(19) United States
(12) Patent Application Publication
(10) Pub. No.: US 2010/0010066 A1
(43) Pub. Date: Jan. 14, 2010

(54) Optimized Methods For Delivery Of DSRNA Targeting The PCSK9 Gene

(76) Inventors: Kevin Fitzgerald, Brookline, MA (US); Antonin de Fougerolles, Brookline, MA (US); Akin Akinc, Needham, MA (US); Victor E. Kotelianski, Boston, MA (US)

Correspondence Address: ALNYLAM/FENWICK, SILICON VALLEY CENTER, 801 CALIFORNIA STREET, MOUNTAIN VIEW, CA, 94041, US

(21) Appl. No.: 12/478,452

(22) Filed: Jun. 4, 2009

Related U.S. Application Data
(63) Continuation of application No. PCT/US2009/032743, filed on Jan. 30, 2009.
(60) Provisional application No. 61/024,968, filed on Jan. 31, 2008.
(60) Provisional application No. 61/039,083, filed on Mar. 24, 2008.
(60) Provisional application No. 61/076,548, filed on Jun. 27, 2008.
(60) Provisional application No. 61/188,765, filed on Aug. 11, 2008.

(51) Int. Cl. A61K 31/713; A61P 7/00

(52) U.S. Cl. 514/44 A; 514/44 R

(57) ABSTRACT

This invention relates to optimized methods for treating diseases caused by PCSK9 gene expression.

### CROSS REFERENCE TO RELATED APPLICATIONS

[0001] This application is a continuation of co-pending PCT application number PCT/US2009/032743 with an international filing date of Jan. 30, 2009 which claims the benefit of U.S. Provisional Application No. 61/024,968, filed Jan. 31, 2008, which is hereby incorporated in its entirety by reference, and claims the benefit of U.S. Provisional Application No. 61/039,083, filed Mar. 24, 2008, which is hereby incorporated in its entirety by reference, and claims the benefit of U.S. Provisional Application No. 61/076,548, filed Jun. 27, 2008, which is hereby incorporated in its entirety by reference, and claims the benefit of U.S. Provisional Application No. 61/188,765, filed Aug. 11, 2008, which is hereby incorporated in its entirety by reference.

### FIELD OF THE INVENTION

[0002] This invention relates to optimized methods for treating diseases caused by PCSK9 gene expression.

### BACKGROUND OF THE INVENTION

[0003] Proprotein convertase subtilisin kexin 9 (PCSK9) is a member of the subtilisin serine protease family. The other eight mammalian subtilisin proteases, PCSK1-PCSK8 (also called PC1/3, PC2, furin, PC4, PC5/6, PACE4, PC7, and S1P/SKI-1) are proprotein convertases that process a wide variety of proteins in the secretory pathway and play roles in diverse biological processes (Bergeron, F. (2000) J. Mol. Endocrinol. 24, 1-22, Gensberg, K., (1998) Semin. Cell Dev. Biol. 9, 11-17, Seidah, N. G. (1999) Brain Res. 848, 45-62, Taylor, N. A., (2003) FASEB J. 17, 1215-1227, and Zhou, A., (1999) J. Biol. Chem. 274, 20745-20748). PCSK9 has been proposed to play a role in cholesterol metabolism. PCSK9 mRNA expression is down-regulated by dietary cholesterol feeding in mice (Maxwell, K. N., (2003) J. Lipid Res. 44, 2109-2119), up-regulated by statins in HepG2 cells (Dubuc, G., (2004) Arterioscler. Thromb. Vasc. Biol. 24, 1454-1459), and up-regulated in sterol regulatory element binding protein (SREBP) transgenic mice (Horton, J. D., (2003) Proc. Natl. Acad. Sci. USA 100, 12027-12032), similar to the cholesterol biosynthetic enzymes and the low-density lipoprotein receptor (LDLR). Furthermore, PCSK9 missense mutations have been found to be associated with a form of autosomal dominant hypercholesterolemia (Hchola3) (Abifadel, M., et al. (2003) Nat. Genet. 34, 154-156, Timms, K. M., (2004) Hum. Genet. 114, 349-353, Leren, T. P. (2004) Clin. Genet. 65, 419-422). PCSK9 may also play a role in determining LDL cholesterol levels in the general population, because single-nucleotide polymorphisms (SNPs) have been associated with cholesterol levels in a Japanese population (Shioji, K., (2004) J. Hum. Genet. 49, 109-114).

[0004] Autosomal dominant hypercholesterolemias (ADHs) are monogenic diseases in which patients exhibit elevated total and LDL cholesterol levels, tendon xanthomas, and premature atherosclerosis (Rader, D. J., (2003) J. Clin. Invest. 11, 1795-1803). The pathogenesis of ADHs and a recessive form, autosomal recessive hypercholesterolemia (ARH) (Cohen, J. C., (2003) Curr. Opin. Lipidol. 14, 121-127), is due to defects in LDL uptake by the liver. ADH may be caused by LDLR mutations, which prevent LDL uptake, or by mutations in the protein on LDL, apolipoprotein B, which binds to the LDLR. ARH is caused by mutations in the ARH protein that are necessary for endocytosis of the LDLR-LDL complex via its interaction with clathrin. Therefore, if PCSK9 mutations are causative in Hchola3 families, it seems likely that PCSK9 plays a role in receptor-mediated LDL uptake.

[0005] Overexpression studies point to a role for PCSK9 in controlling LDLR levels and, hence, LDL uptake by the liver (Maxwell, K. N. (2004) Proc. Natl. Acad. Sci. USA 101, 7100-7105, Benjannet, S., et al. (2004) J. Biol. Chem. 279, 48865-48875, Park, S. W., (2004) J. Biol. Chem. 279, 50630-50638). Adenoviral-mediated overexpression of mouse or human PCSK9 for 3 or 4 days in mice results in elevated total and LDL cholesterol levels; this effect is not seen in LDLR knockout animals (Maxwell, K. N. (2004) Proc. Natl. Acad. Sci. USA 101, 7100-7105, Benjannet, S., et al. (2004) J. Biol. Chem. 279, 48865-48875, Park, S. W., (2004) J. Biol. Chem. 279, 50630-50638). In addition, PCSK9 overexpression results in a severe reduction in hepatic LDLR protein, without affecting LDLR mRNA levels, SREBP protein levels, or SREBP protein nuclear to cytoplasmic ratio.

[0006] Loss of function mutations in PCSK9 have been designed in mouse models (Rashid et al., (2005) PNAS, 102, 5374-5379), and identified in human individuals (Cohen et al. (2005) Nature Genetics 37:161-165). In both cases loss of PCSK9 function lead to lowering of total and LDLc cholesterol. In a retrospective outcome study over 15 years, loss of one copy of PCSK9 was shown to shift LDLc levels lower and to lead to an increased risk-benefit protection from developing cardiovascular heart disease (Cohen et al., (2006) N. Engl. J. Med., 354:1264-1272).

[0007] Recently, double-stranded RNA molecules (dsRNA) have been shown to block gene expression in a highly conserved regulatory mechanism known as RNA interference (RNAi). WO 99/32619 (Fire et al.) discloses the use of a dsRNA of at least 25 nucleotides in length to inhibit the expression of genes in C. elegans. dsRNA has also been shown to degrade target RNA in other organisms, including plants (see, e.g., WO 99/53050, Waterhouse et al.; and WO 99/61631, Heifetz et al.), Drosophila (see, e.g., Yang, D., et al., Curr. Biol. (2000) 10: 1191-1200), and mammals (see WO 00/44895, Limmer; and DE 101 00 586.5, Kreutzer et al.). This natural mechanism has now become the focus for the development of a new class of pharmaceutical agents for treating disorders that are caused by the aberrant or unwanted regulation of a gene.

### SUMMARY OF THE INVENTION

[0008] The invention provides methods for treating a subject having a disorder, e.g., hyperlipidemia, metabolic syndrome, or a PCSK9-mediated disorder, by administration of a double-stranded ribonucleic acid (dsRNA) targeted to a PCSK9 gene.

[0009] Accordingly, disclosed herein is a method for inhibiting expression of a PCSK9 gene in a subject, e.g., a human, the method comprising administering a first dose of a dsRNA targeted to the PCSK9 gene and after a time interval optionally administering a second dose of the dsRNA wherein the time interval is not less than 7 days. In some embodiments, the method inhibits PCSK9 gene expression by at least 40% or by at least 30%.

[0010] In one embodiment, the method includes a single dose of dsRNA.

[0011] The method can lower serum LDL cholesterol in the subject. In some embodiments the method lowers serum LDL cholesterol in the subject for at least 7 days or at least 14 days, or at least 21 days. In other embodiments, the method lowers serum LDL cholesterol in the subject by at least 30%. The method can lower serum LDL cholesterol within 2 days or within 3 days or within 7 days of administration of the first dose. In a further embodiment, the method lowers serum LDL cholesterol by at least 30% within 3 days.

[0012] In a further embodiment, circulating serum ApoB levels are reduced or HDLc levels are stable or triglyceride levels are stable or liver triglyceride levels are stable or liver cholesterol levels are stable. In a still further embodiment, the method increases LDL receptor (LDLR) levels.

[0013] In addition, the method can lower total serum cholesterol in the subject. In one aspect, the method lowers total cholesterol in the subject for at least 7 days or for at least 10 days or for at least 14 days or at least 21 days. In another aspect, the method lowers total cholesterol in the subject by at least 30%. In a further aspect, the method lowers total cholesterol within 2 days or within 3 days or within 7 days of administration.

[0014] The dsRNA used in the method of the invention targets a PCSK9 gene. In one embodiment, the dsRNA is a dsRNA described in Table 1a, Table 2a, Table 5a, or Table 6 or AD-3511. In another embodiment, the PCSK9 target is SEQ ID NO:1523 or the dsRNA comprises a sense strand comprising at least one internal mismatch to SEQ ID NO:1523. In a further embodiment, the dsRNA comprises a sense strand consisting of SEQ ID NO:1227 and the antisense strand consists of SEQ ID NO:1228. The dsRNA can be, e.g., AD-9680.

[0015] Alternatively, the dsRNA is targeted to SEQ ID NO:1524 or the dsRNA comprises a sense strand comprising at least one internal mismatch to SEQ ID NO:1524. In one aspect the dsRNA comprises a sense strand consisting of SEQ ID NO:457 and an antisense strand consisting of SEQ ID NO:458. The dsRNA can be, e.g., AD-10792.

[0016] As described herein, the method uses a dsRNA comprising an antisense strand substantially complementary to less than 30 consecutive nucleotide of an mRNA encoding PCSK9. In one embodiment, the dsRNA comprises an antisense strand substantially complementary to 19-24 nucleotides of an mRNA encoding PCSK9. In another embodiment, each strand of the dsRNA is 19, 20, 21, 22, 23, or 24 nucleotides in length. In a further embodiment, at least one strand of the dsRNA includes at least one additional modified nucleotide, e.g., a 2′-O-methyl modified nucleotide, a nucleotide having a 5′-phosphorothioate group, a terminal nucleotide linked to a cholesteryl derivative, a 2′-deoxy-2′-fluoro modified nucleotide, a 2′-deoxy-modified nucleotide, a locked nucleotide, an abasic nucleotide, a 2′-amino-modified nucleotide, a 2′-alkyl-modified nucleotide, a morpholino nucleotide, a phosphoramidate, and a non-natural base comprising nucleotide. In one aspect, the dsRNA is conjugated to a ligand, e.g., an agent which facilitates uptake across liver cells, e.g., Chol-p-(GalNAc)3 (N-acetyl galactosamine cholesterol) or LCO(GalNAc)3 (N-acetyl galactosamine-3′-Lithocholic-oleoyl.

[0017] In the method of the invention, the dsRNA can be administered in a formulation. In one embodiment, the dsRNA is administered in a lipid formulation, e.g., a LNP or a SNALP formulation. The dsRNA can be administered at a dosage of about 0.01, 0.1, 0.5, 1.0, 2.5, or 5 mg/kg. In some embodiments, dsRNA is administered subdermally or subcutaneously or intravenously. In further embodiments, a second compound is co-administered with the dsRNA, e.g., a second compound selected from the group consisting of an agent for treating hypercholesterolemia, atherosclerosis and dyslipidemia, e.g., a statin.

[0018] In some embodiments of the method, the subject is a primate, e.g., a human, e.g., a hyperlipidemic human.

[0019] The invention also provides a composition comprising any of the isolated dsRNA described in Table 6 or the dsRNA AD-3511. In some embodiments, at least one strand of the dsRNA described in Table 6 or AD3511 includes at least one additional modified nucleotide, e.g., a 2′-O-methyl modified nucleotide, a nucleotide having a 5′-phosphorothioate group, a terminal nucleotide linked to a cholesteryl derivative, a 2′-deoxy-2′-fluoro modified nucleotide, a 2′-deoxy-modified nucleotide, a locked nucleotide, an abasic nucleotide, a 2′-amino-modified nucleotide, a 2′-alkyl-modified nucleotide, a morpholino nucleotide, a phosphoramidate, or a non-natural base comprising nucleotide.

[0020] In one embodiment of the composition, the dsRNA is conjugated to a ligand, e.g., to an agent which facilitates uptake across liver cells, e.g., to Chol-p-(GalNAc)₃ (N-acetyl galactosamine cholesterol) or LCO(GalNAc)³ (N-acetyl galactosamine-3′-Lithocholic-oleoyl.

[0021] In a further embodiment of the composition, the dsRNA is in a lipid formulation, e.g., a LPN or a SNALP formulation.

[0022] The details of one or more embodiments of the invention are set forth in the accompanying drawings and the description below. Other features, objects, and advantages of the invention will be apparent from the description and drawings, and from the claims.

### BRIEF DESCRIPTION OF THE DRAWINGS

[0023] The prefixes “AD-” “DP-” and “AL-DP-” are used interchangeably e.g., AL-DP-9327 and AD-9237.

[0024] FIG. 1 shows the structure of the ND-98 lipid.

[0025] FIG. 2 shows the results of the in vivo screen of 16 mouse specific (AL-DP-9327 through AL-DP-9342) PCSK9 siRNAs directed against different ORF regions of PCSK9 mRNA (having the first nucleotide corresponding to the ORF position indicated on the graph) in C57/BL6 mice (5 animals/group). The ratio of PCSK9 mRNA to GAPDH mRNA in liver lysates was averaged over each treatment group and compared to a control group treated with PBS or a control group treated with an unrelated siRNA (blood coagulation factor VII).

[0026] FIG. 3 shows the results of the in vivo screen of 16 human/mouse/rat cross-reactive (AL-DP-9311 through AL-DP-9326) PCSK9 siRNAs directed against different ORF regions of PCSK9 mRNA (having the first nucleotide corresponding to the ORF position indicated on the graph) in C57/BL6 mice (5 animals/group). The ratio of PCSK9 mRNA to GAPDH mRNA in liver lysates was averaged over each treatment group and compared to a control group treated with PBS or a control group treated with an unrelated siRNA (blood coagulation factor VII).

[0027] FIG. 4 shows the results of the in vivo screen of 16 mouse specific (AL-DP-9327 through AL-DP-9342) PCSK9 siRNAs in C57/BL6 mice (5 animals/group). Total serum cholesterol levels were averaged over each treatment group and compared to a control group treated with PBS or a control group treated with an unrelated siRNA (blood coagulation factor VII).

[0028] FIG. 5 shows the results of the in vivo screen of 16 human/mouse/rat cross-reactive (AL-DP-9311 through AL-DP-9326) PCSK9 siRNAs in C57/BL6 mice (5 animals/group). Total serum cholesterol levels were averaged over each treatment group and compared to a control group treated with PBS or a control group treated with an unrelated siRNA (blood coagulation factor VII).

[0029] FIGS. 6A and 6B compare in vitro and in vivo results, respectively, for silencing PCSK9.

[0030] FIG. 7A and FIG. 7B are an example of in vitro results for silencing PCSK9 using monkey primary hepatocytes.

[0031] FIG. 7C show results for silencing of PCSK9 in monkey primary hepatocytes using AL-DP-9680 and chemically modified version of AL-DP-9680.

[0032] FIG. 8 shows in vivo activity of LNP-01 formulated siRNAs to PCSK-9.

[0033] FIGS. 9A and 9B show in vivo activity of LNP-01 Formulated chemically modified 9314 and derivatives with chemical modifications such as AD-10792, AD-12382, AD-12384, AD-12341 at different times post a single dose in mice.

[0034] FIG. 10A shows the effect of PCSK9 siRNAs on PCSK9 transcript levels and total serum cholesterol levels in rats after a single dose of formulated AD-10792. FIG. 10B shows the effect of PCSK9 siRNAs on serum total cholesterol levels in the experiment as 10A. A single dose of formulated AD-10792 results in an ˜60% lowering of total cholesterol in the rats that returns to baseline by ˜3-4 weeks. FIG. 10C shows the effect of PCSK9 siRNAs on hepatic cholesterol and triglyceride levels in the same experiment as 10A.

[0035] FIG. 11 is a Western blot showing that liver LDL receptor levels were upregulated following administration of PCSK9 siRNAs in rat.

[0036] FIGS. 12A-12D show the effects of PCSK9 siRNAs on LDLc and ApoB protein levels, total cholesterol/HDLc ratios, and PCSK9 protein levels, respectively, in nonhuman primates following a single dose of formulated AD-10792 or AD-9680.

[0037] FIG. 13A is a graph showing that unmodified siRNA-AD-A1A (AD-9314), but not 2′OMe modified siRNA-AD-1A2 (AD-10792), induced IFN-alpha in human primary blood monocytes. FIG. 13B is a graph showing that unmodified siRNA-AD-A1A (AD-9314), but not 2′OMe modified siRNA-AD-1A2 (AD-10792), also induced TNF-alpha in human primary blood monocytes.

[0038] FIG. 14A is a graph showing that the PCSK9 siRNA siRNA-AD-1A2 (a.k.a. LNP-PCS-A2 or a.k.a. “formulated AD-10792”) decreased PCSK9 mRNA levels in mice liver in a dose-dependent manner. FIG. 14B is a graph showing that single administration of 5 mg/kg siRNA-AD-1A2 decreased serum total cholesterol levels in mice within 48 hours.

[0039] FIG. 15A is a graph showing that PCSK9 siRNAs targeting human and monkey PCSK9 (LNP-PCS-C2) (a.k.a. “formulated AD-9736”), and PCSK9 siRNAs targeting mouse PCSK9 (LNP-PCS-A2) (a.k.a. “formulated AD-10792”), reduced liver PCSK9 levels in transgenic mice expressing human PCSK9. FIG. 15B is a graph showing that LNP-PCS-C2 and LNP-PCS-A2 reduced plasma PCSK9 levels in the same transgenic mice.

[0040] FIG. 16 shows the structure of an siRNA conjugated to Chol-p-(GalNAc)3 via phosphate linkage at the 3′ end.

[0041] FIG. 17 shows the structure of an siRNA conjugated to LCO(GalNAc)3 (a (GalNAc)3-3′-Lithocholic-oleoyl siRNA Conjugate).

[0042] FIG. 18 is a graph showing the results of conjugated siRNAs on PCSK9 transcript levels and total serum cholesterol in mice.

[0043] FIG. 19 is a graph showing the results of lipid formulated siRNAs on PCSK9 transcript levels and total serum cholesterol in rats.

[0044] FIG. 20 is a graph showing the results of siRNA transfection on PCSK9 transcript levels in HeLa cells using AD-9680 and variations of AD-9680 as described in Table 6.

[0045] FIG. 21 is a graph showing the results of siRNA transfection on PCSK9 transcript levels in HeLa cells using AD-14676 and variations of AD-14676 as described in Table 6.

### DETAILED DESCRIPTION OF THE INVENTION

[0046] The invention provides a solution to the problem of treating diseases that can be modulated by the down regulation of the PCSK9 gene, such as hyperlipidemia, by using double-stranded ribonucleic acid (dsRNA) to silence the PCSK9 gene.

[0047] The invention provides compositions and methods for inhibiting the expression of the PCSK9 gene in a subject using a dsRNA. The invention also provides compositions and methods for treating pathological conditions and diseases, such as hyperlipidemia, that can be modulated by down regulating the expression of the PCSK9 gene. dsRNA directs the sequence-specific degradation of mRNA through a process known as RNA interference (RNAi).

[0048] The dsRNA useful for the compositions and methods of an invention include an RNA strand (the antisense strand) having a region that is less than 30 nucleotides in length, generally 19-24 nucleotides in length, and is substantially complementary to at least part of an mRNA transcript of the PCSK9 gene. The use of these dsRNAs enables the targeted degradation of an mRNA that is involved in the regulation of the LDL Receptor and circulating cholesterol levels. Using cell-based and animal assays, the present inventors have demonstrated that very low dosages of these dsRNAs can specifically and efficiently mediate RNAi, resulting in significant inhibition of expression of the PCSK9 gene. Thus, methods and compositions including these dsRNAs are useful for treating pathological processes that can be mediated by down regulating PCSK9, such as in the treatment of hyperlipidemia.

[0049] The following detailed description discloses how to make and use the dsRNA and compositions containing dsRNA to inhibit the expression of the target PCSK9 gene, as well as compositions and methods for treating diseases that can be modulated by down regulating the expression of PCSK9, such as hyperlipidemia. The pharmaceutical compositions of the invention include a dsRNA having an antisense strand having a region of complementarity that is less than 30 nucleotides in length, generally 19-24 nucleotides in length, and that is substantially complementary to at least part of an RNA transcript of the PCSK9 gene, together with a pharmaceutically acceptable carrier.

[0050] Accordingly, certain aspects of the invention provide pharmaceutical compositions including the dsRNA that targets PCSK9 together with a pharmaceutically acceptable carrier, methods of using the compositions to inhibit expression of the PCSK9 gene, and methods of using the pharmaceutical compositions to treat diseases by down regulating the expression of PCSK9.

### DEFINITIONS

[0051] For convenience, the meaning of certain terms and phrases used in the specification, examples, and appended claims, are provided below. If there is an apparent discrepancy between the usage of a term in other parts of this specification and its definition provided in this section, the definition in this section shall prevail.

[0052] “G,” “C,” “A” and “U” each generally stand for a nucleotide that contains guanine, cytosine, adenine, and uracil as a base, respectively. “T” and “dT” are used interchangeably herein and refer to a deoxyribonucleotide wherein the nucleobase is thymine, e.g., deoxyribothymine. However, it will be understood that the term “ribonucleotide” or “nucleotide” or “deoxyribonucleotide” can also refer to a modified nucleotide, as further detailed below, or a surrogate replacement moiety. The skilled person is well aware that guanine, cytosine, adenine, and uracil may be replaced by other moieties without substantially altering the base pairing properties of an oligonucleotide comprising a nucleotide bearing such replacement moiety. For example, without limitation, a nucleotide comprising inosine as its base may base pair with nucleotides containing adenine, cytosine, or uracil. Hence, nucleotides containing uracil, guanine, or adenine may be replaced in the nucleotide sequences of the invention by a nucleotide containing, for example, inosine. Sequences comprising such replacement moieties are embodiments of the invention.

[0053] As used herein, “PCSK9” refers to the proprotein convertase subtilisin kexin 9 gene or protein (also known as FH3, HCHOLA3, NARC-1, NARC1). Examples of mRNA sequences to PCSK9 include but are not limited to the following: human: NM_{—}174936; mouse: NM_{—}153565, and rat: NM_{—}199253. Additional examples of PCSK9 mRNA sequences are readily available using, e.g., GenBank.

[0054] As used herein, “target sequence” refers to a contiguous portion of the nucleotide sequence of an mRNA molecule formed during the transcription of the PCSK9 gene, including mRNA that is a product of RNA processing of a primary transcription product.

[0055] As used herein, the term “strand comprising a sequence” refers to an oligonucleotide comprising a chain of nucleotides that is described by the sequence referred to using the standard nucleotide nomenclature.

[0056] As used herein, and unless otherwise indicated, the term “complementary,” when used to describe a first nucleotide sequence in relation to a second nucleotide sequence, refers to the ability of an oligonucleotide or polynucleotide comprising the first nucleotide sequence to hybridize and form a duplex structure under certain conditions with an oligonucleotide or polynucleotide comprising the second nucleotide sequence, as will be understood by the skilled person. Such conditions can, for example, be stringent conditions, where stringent conditions may include: 400 mM NaCl, 40 mM PIPES pH 6.4, 1 mM EDTA, 50° C. or 70° C. for 12-16 hours followed by washing. Other conditions, such as physiologically relevant conditions as may be encountered inside an organism, can apply. The skilled person will be able to determine the set of conditions most appropriate for a test of complementarity of two sequences in accordance with the ultimate application of the hybridized nucleotides.

[0057] This includes base-pairing of the oligonucleotide or polynucleotide having the first nucleotide sequence to the oligonucleotide or polynucleotide having the second nucleotide sequence over the entire length of the first and second nucleotide sequences. Such sequences can be referred to as “fully complementary” with respect to each other. However, where a first sequence is referred to as “substantially complementary” with respect to a second sequence herein, the two sequences can be fully complementary, or they may form one or more, but generally not more than 4, 3 or 2 mismatched base pairs upon hybridization, while retaining the ability to hybridize under the conditions most relevant to their ultimate application. However, where two oligonucleotides are designed to form, upon hybridization, one or more single stranded overhangs, such overhangs shall not be regarded as mismatches with regard to the determination of complementarity. For example, a dsRNA having one oligonucleotide 21 nucleotides in length and another oligonucleotide 23 nucleotides in length, wherein the longer oligonucleotide has a sequence of 21 nucleotides that is fully complementary to the shorter oligonucleotide, may yet be referred to as “fully complementary.”

[0058] “Complementary” sequences, as used herein, may also include, or be formed entirely from, non-Watson-Crick base pairs and/or base pairs formed from non-natural and modified nucleotides, in as far as the above requirements with respect to their ability to hybridize are fulfilled.

[0059] The terms “complementary”, “fully complementary” and “substantially complementary” herein may be used with respect to the base matching between the sense strand and the antisense strand of a dsRNA, or between the antisense strand of a dsRNA and a target sequence, as will be understood from the context of their use.

[0060] As used herein, a polynucleotide which is “substantially complementary to at least part of” a messenger RNA (mRNA) refers to a polynucleotide that is substantially complementary to a contiguous portion of the mRNA of interest (e.g., encoding PCSK9) including a 5′ UTR, an open reading frame (ORF), or a 3′ UTR. For example, a polynucleotide is complementary to at least a part of a PCSK9 mRNA if the sequence is substantially complementary to a non-interrupted portion of an mRNA encoding PCSK9.

[0061] The term “double-stranded RNA” or “dsRNA”, as used herein, refers a duplex structure comprising two anti-parallel and substantially complementary, as defined above, nucleic acid strands. The two strands forming the duplex structure may be different portions of one larger RNA molecule, or they may be separate RNA molecules. Where separate RNA molecules, such dsRNA are often referred to in the literature as siRNA (“short interfering RNA”). Where the two strands are part of one larger molecule, and therefore are connected by an uninterrupted chain of nucleotides between the 3′-end of one strand and the 5′ end of the respective other strand forming the duplex structure, the connecting RNA chain is referred to as a “hairpin loop”, “short hairpin RNA” or “shRNA”. Where the two strands are connected covalently by means other than an uninterrupted chain of nucleotides between the 3′-end of one strand and the 5′ end of the respective other strand forming the duplex structure, the connecting structure is referred to as a “linker”. The RNA strands may have the same or a different number of nucleotides. The maximum number of base pairs is the number of nucleotides in the shortest strand of the dsRNA minus any overhangs that are present in the duplex. In addition to the duplex structure, a dsRNA may comprise one or more nucleotide overhangs. In general, the majority of nucleotides of each strand are ribonucleotides, but as described in detail herein, each or both strands can also include at least one non-ribonucleotide, e.g., a deoxyribonucleotide and/or a modified nucleotide. In addition, as used in this specification, “dsRNA” may include chemical modifications to ribonucleotides, including substantial modifications at multiple nucleotides and including all types of modifications disclosed herein or known in the art. Any such modifications, as used in an siRNA type molecule, are encompassed by “dsRNA” for the purposes of this specification and claims.

[0062] As used herein, a “nucleotide overhang” refers to the unpaired nucleotide or nucleotides that protrude from the duplex structure of a dsRNA when a 3′-end of one strand of the dsRNA extends beyond the 5′-end of the other strand, or vice versa. “Blunt” or “blunt end” means that there are no unpaired nucleotides at that end of the dsRNA, i.e., no nucleotide overhang. A “blunt ended” dsRNA is a dsRNA that is double-stranded over its entire length, i.e., no nucleotide overhang at either end of the molecule. For clarity, chemical caps or non-nucleotide chemical moieties conjugated to the 3′ end or 5′ end of an siRNA are not considered in determining whether an siRNA has an overhang or is blunt ended.

[0063] The term “antisense strand” refers to the strand of a dsRNA which includes a region that is substantially complementary to a target sequence. As used herein, the term “region of complementarity” refers to the region on the antisense strand that is substantially complementary to a sequence, for example a target sequence, as defined herein. Where the region of complementarity is not fully complementary to the target sequence, the mismatches may be in the internal or terminal regions of the molecule. Generally the most tolerated mismatches are in the terminal regions, e.g., within 6, 5, 4, 3, or 2 nucleotides of the 5′ and/or 3′ terminus.

[0064] The term “sense strand,” as used herein, refers to the strand of a dsRNA that includes a region that is substantially complementary to a region of the antisense strand.

[0065] “Introducing into a cell”, when referring to a dsRNA, means facilitating uptake or absorption into the cell, as is understood by those skilled in the art. Absorption or uptake of dsRNA can occur through unaided diffusive or active cellular processes, or by auxiliary agents or devices. The meaning of this term is not limited to cells in vitro; a dsRNA may also be “introduced into a cell”, wherein the cell is part of a living organism. In such instance, introduction into the cell will include the delivery to the organism. For example, for in vivo delivery, dsRNA can be injected into a tissue site or administered systemically. In vitro introduction into a cell includes methods known in the art such as electroporation and lipofection.

[0066] The terms “silence,” “inhibit the expression of,” “down-regulate the expression of,” “suppress the expression of,” and the like, in as far as they refer to the PCSK9 gene, herein refer to the at least partial suppression of the expression of the PCSK9 gene, as manifested by a reduction of the amount of PCSK9 mRNA which may be isolated from a first cell or group of cells in which the PCSK9 gene is transcribed and which has or have been treated such that the expression of the PCSK9 gene is inhibited, as compared to a second cell or group of cells substantially identical to the first cell or group of cells but which has or have not been so treated (control cells). The degree of inhibition is usually expressed in terms of

$$\frac{( mRNA in control cells ) - ( mRNA in treated cells )}{( mRNA in control cells )} \cdot 100 \%$$

[0067] Alternatively, the degree of inhibition may be given in terms of a reduction of a parameter that is functionally linked to PCSK9 gene expression, e.g. the amount of protein encoded by the PCSK9 gene which is produced by a cell, or the number of cells displaying a certain phenotype. In principle, target gene silencing can be determined in any cell expressing the target, either constitutively or by genomic engineering, and by any appropriate assay. However, when a reference is needed in order to determine whether a given dsRNA inhibits the expression of the PCSK9 gene by a certain degree and therefore is encompassed by the instant invention, the assays provided in the Examples below shall serve as such reference.

[0068] As used herein in the context of PCSK9 expression, the terms “treat”, “treatment”, and the like, refer to relief from or alleviation of pathological processes which can be mediated by down regulating the PCSK9 gene. In the context of the present invention insofar as it relates to any of the other conditions recited herein below (other than pathological processes which can be mediated by down regulating the PCSK9 gene), the terms “treat”, “treatment”, and the like mean to relieve or alleviate at least one symptom associated with such condition, or to slow or reverse the progression of such condition. For example, in the context of hyperlipidemia, treatment will involve a decrease in serum lipid levels.

[0069] As used herein, the phrases “therapeutically effective amount” and “prophylactically effective amount” refer to an amount that provides a therapeutic benefit in the treatment, prevention, or management of pathological processes that can be mediated by down regulating the PCSK9 gene or an overt symptom of pathological processes which can be mediated by down regulating the PCSK9 gene. The specific amount that is therapeutically effective can be readily determined by an ordinary medical practitioner, and may vary depending on factors known in the art, such as, e.g., the type of pathological processes that can be mediated by down regulating the PCSK9 gene, the patient's history and age, the stage of pathological processes that can be mediated by down regulating PCSK9 gene expression, and the administration of other anti-pathological processes that can be mediated by down regulating PCSK9 gene expression.

[0070] As used herein, a “pharmaceutical composition” includes a pharmacologically effective amount of a dsRNA and a pharmaceutically acceptable carrier. As used herein, “pharmacologically effective amount,” “therapeutically effective amount” or simply “effective amount” refers to that amount of an RNA effective to produce the intended pharmacological, therapeutic or preventive result. For example, if a given clinical treatment is considered effective when there is at least a 25% reduction in a measurable parameter associated with a disease or disorder, a therapeutically effective amount of a drug for the treatment of that disease or disorder is the amount necessary to effect at least a 25% reduction in that parameter.

[0071] The term “pharmaceutically acceptable carrier” refers to a carrier for administration of a therapeutic agent. Such carriers include, but are not limited to, saline, buffered saline, dextrose, water, glycerol, ethanol, and combinations thereof and are described in more detail below. The term specifically excludes cell culture medium.

[0072] As used herein, a “transformed cell” is a cell into which a vector has been introduced from which a dsRNA molecule may be expressed.

[0073] Double-Stranded Ribonucleic Acid (dsRNA)

[0074] As described in more detail below, the invention provides methods and composition having double-stranded ribonucleic acid (dsRNA) molecules for inhibiting the expression of the PCSK9 gene in a cell or mammal, wherein the dsRNA includes an antisense strand having a region of complementarity that is complementary to at least a part of an mRNA formed in the expression of the PCSK9 gene, and wherein the region of complementarity is less than 30 nucleotides in length, generally 19-24 nucleotides in length. In some embodiments, the dsRNA, upon contact with a cell expressing the PCSK9 gene, inhibits the expression of said PCSK9 gene, e.g., as measured such as by an assay described herein.

[0075] The dsRNA includes two nucleic acid strands that are sufficiently complementary to hybridize to form a duplex structure. One strand of the dsRNA (the antisense strand) can have a region of complementarity that is substantially complementary, and generally fully complementary, to a target sequence, derived from the sequence of an mRNA formed during the expression of the PCSK9 gene. The other strand (the sense strand) includes a region that is complementary to the antisense strand, such that the two strands hybridize and form a duplex structure when combined under suitable conditions. Generally, the duplex structure is between 15 and 30, more generally between 18 and 25, yet more generally between 19 and 24, and most generally between 19 and 21 base pairs in length. In one embodiment the duplex structure is 21 base pairs in length. In another embodiment, the duplex structure is 19 base pairs in length. Similarly, the region of complementarity to the target sequence is between 15 and 30, more generally between 18 and 25, yet more generally between 19 and 24, and most generally between 19 and 21 nucleotides in length. In one embodiment the region of complementarity is 19 nucleotides in length.

[0076] The dsRNA can be synthesized by standard methods known in the art as further discussed below, e.g., by use of an automated DNA synthesizer, such as are commercially available from, for example, Biosearch, Applied Biosystems, Inc. In one embodiment, the PCSK9 gene is a human PCSK9 gene. In other embodiments, the antisense strand of the dsRNA includes a first strand selected from the sense sequences of Table 1a, Table 2a, and Table 5a, and a second strand selected from the antisense sequences of Table 1a, Table 2a, and Table 5a. Alternative antisense agents that target elsewhere in the target sequence provided in Table 1a, Table 2a, and Table 5a, can readily be determined using the target sequence and the flanking PCSK9 sequence.

[0077] For example, the dsRNA AD-9680 (from Table 1a) targets the PCSK 9 gene at 3530-3548; there fore the target sequence is as follows: 5′ UUCUAGACCUGUUUUGCUU 3′ (SEQ ID NO:1523). The dsRNA AD-10792 (from Table 1a) targets the PCSK9 gene at 1091-1109; therefore the target sequence is as follows: 5′ GCCUGGAGUUUAUUCGGAA 3′ (SEQ ID NO:1524). Included in the invention are dsRNAs that have regions of complementarity to SEQ ID NO:1523 and SEQ ID NO:1524.

[0078] In further embodiments, the dsRNA includes at least one nucleotide sequence selected from the groups of sequences provided in Table 1a, Table 2a, and Table 5a. In other embodiments, the dsRNA includes at least two sequences selected from this group, where one of the at least two sequences is complementary to another of the at least two sequences, and one of the at least two sequences is substantially complementary to a sequence of an mRNA generated in the expression of the PCSK9 gene. Generally, the dsRNA includes two oligonucleotides, where one oligonucleotide is described as the sense strand in Table 1a, Table 2a, and Table 5a and the second oligonucleotide is described as the antisense strand in Table 1a, Table 2a, and Table 5a

[0079] The skilled person is well aware that dsRNAs having a duplex structure of between 20 and 23, but specifically 21, base pairs have been hailed as particularly effective in inducing RNA interference (Elbashir et al., EMBO 2001, 20:6877-6888). However, others have found that shorter or longer dsRNAs can be effective as well. In the embodiments described above, by virtue of the nature of the oligonucleotide sequences provided in Table 1a, Table 2a, and Table 5a, the dsRNAs of the invention can include at least one strand of a length of minimally 21 nt. It can be reasonably expected that shorter dsRNAs having one of the sequences of Table 1a, Table 2a, and Table 5a minus only a few nucleotides on one or both ends may be similarly effective as compared to the dsRNAs described above. Hence, dsRNAs having a partial sequence of at least 15, 16, 17, 18, 19, 20, or more contiguous nucleotides from one of the sequences of Table 1a, Table 2a, and Table 5a, and differing in their ability to inhibit the expression of the PCSK9 gene in a FACS assay as described herein below by not more than 5, 10, 15, 20, 25, or 30% inhibition from a dsRNA comprising the full sequence, are contemplated by the invention. Further dsRNAs that cleave within the target sequence provided in Table 1a, Table 2a, and Table 5a can readily be made using the PCSK9 sequence and the target sequence provided.

[0080] In addition, the RNAi agents provided in Table 1a, Table 2a, and Table 5a identify a site in the PCSK9 mRNA that is susceptible to RNAi based cleavage. As such the present invention further includes RNAi agents that target within the sequence targeted by one of the agents of the present invention. As used herein a second RNAi agent is said to target within the sequence of a first RNAi agent if the second RNAi agent cleaves the message anywhere within the mRNA that is complementary to the antisense strand of the first RNAi agent. Such a second agent will generally consist of at least 15 contiguous nucleotides from one of the sequences provided in Table 1a, Table 2a, and Table 5a coupled to additional nucleotide sequences taken from the region contiguous to the selected sequence in the PCSK9 gene. For example, the last 15 nucleotides of SEQ ID NO:1 (minus the added AA sequences) combined with the next 6 nucleotides from the target PCSK9 gene produces a single strand agent of 21 nucleotides that is based on one of the sequences provided in Table 1a, Table 2a, and Table 5a.

[0081] The dsRNA of the invention can contain one or more mismatches to the target sequence. In one embodiment, the dsRNA of the invention contains no more than 1, no more than 2, or no more than 3 mismatches. In one embodiment, the antisense strand of the dsRNA contains mismatches to the target sequence, and the area of mismatch is not located in the center of the region of complementarity. In another embodiment, the antisense strand of the dsRNA contains mismatches to the target sequence and the mismatch is restricted to 5 nucleotides from either end, for example 5, 4, 3, 2, or 1 nucleotide from either the 5′ or 3′ end of the region of complementarity. For example, for a 23 nucleotide dsRNA strand which is complementary to a region of the PCSK9 gene, the dsRNA does not contain any mismatch within the central 13 nucleotides. The methods described within the invention can be used to determine whether a dsRNA containing a mismatch to a target sequence is effective in inhibiting the expression of the PCSK9 gene. Consideration of the efficacy of dsRNAs with mismatches in inhibiting expression of the PCSK9 gene is important, especially if the particular region of complementarity in the PCSK9 gene is known to have polymorphic sequence variation within the population.

[0082] In one embodiment, at least one end of the dsRNA has a single-stranded nucleotide overhang of 1 to 4, generally 1 or 2 nucleotides. dsRNAs having at least one nucleotide overhang have unexpectedly superior inhibitory properties than their blunt-ended counterparts. Moreover, the present inventors have discovered that the presence of only one nucleotide overhang strengthens the interference activity of the dsRNA, without affecting its overall stability. dsRNA having only one overhang has proven particularly stable and effective in vivo, as well as in a variety of cells, cell culture mediums, blood, and serum. Generally, the single-stranded overhang is located at the 3′-terminal end of the antisense strand or, alternatively, at the 3′-terminal end of the sense strand. The dsRNA may also have a blunt end, generally located at the 5′-end of the antisense strand. Such dsRNAs have improved stability and inhibitory activity, thus allowing administration at low dosages, i.e., less than 5 mg/kg body weight of the recipient per day. Generally, the antisense strand of the dsRNA has a nucleotide overhang at the 3′-end, and the 5′-end is blunt. In another embodiment, one or more of the nucleotides in the overhang is replaced with a nucleoside thiophosphate.

[0083] Chemical Modifications and Conjugates

[0084] In yet another embodiment, the dsRNA is chemically modified to enhance stability. The nucleic acids of the invention may be synthesized and/or modified by methods well established in the art, such as those described in “Current protocols in nucleic acid chemistry”, Beaucage, S. L. et al. (Edrs.), John Wiley & Sons, Inc., New York, N.Y., USA, which is hereby incorporated herein by reference. Chemical modifications may include, but are not limited to 2′ modifications, modifications at other sites of the sugar or base of an oligonucleotide, introduction of non-natural bases into the oligonucleotide chain, covalent attachment to a ligand or chemical moiety, and replacement of internucleotide phosphate linkages with alternate linkages such as thiophosphates. More than one such modification may be employed.

[0085] Chemical linking of the two separate dsRNA strands may be achieved by any of a variety of well-known techniques, for example by introducing covalent, ionic or hydrogen bonds; hydrophobic interactions, van der Waals or stacking interactions; by means of metal-ion coordination, or through use of purine analogues. Generally, the chemical groups that can be used to modify the dsRNA include, without limitation, methylene blue; bifunctional groups, generally bis-(2-chloroethyl)amine; N-acetyl-N′-(p-glyoxylbenzoyl)cystamine; 4-thiouracil; and psoralen. In one embodiment, the linker is a hexa-ethylene glycol linker. In this case, the dsRNA are produced by solid phase synthesis and the hexa-ethylene glycol linker is incorporated according to standard methods (e.g., Williams, D. J., and K. B. Hall, Biochem. (1996) 35:14665-14670). In a particular embodiment, the 5′-end of the antisense strand and the 3′-end of the sense strand are chemically linked via a hexaethylene glycol linker. In another embodiment, at least one nucleotide of the dsRNA comprises a phosphorothioate or phosphorodithioate groups. The chemical bond at the ends of the dsRNA is generally formed by triple-helix bonds. Table 1a, Table 2a, and Table 5a provides examples of modified RNAi agents of the invention.

[0086] In yet another embodiment, the nucleotides at one or both of the two single strands may be modified to prevent or inhibit the degradation activities of cellular enzymes, such as, for example, without limitation, certain nucleases. Techniques for inhibiting the degradation activity of cellular enzymes against nucleic acids are known in the art including, but not limited to, 2′-amino modifications, 2′-amino sugar modifications, 2′-F sugar modifications, 2′-F modifications, 2′-alkyl sugar modifications, uncharged backbone modifications, morpholino modifications, 2′-O-methyl modifications, and phosphoramidate (see, e.g., Wagner, Nat. Med. (1995) 1:1116-8). Thus, at least one 2′-hydroxyl group of the nucleotides on a dsRNA is replaced by a chemical group, generally by a 2′-amino or a 2′-methyl group. Also, at least one nucleotide may be modified to form a locked nucleotide. Such locked nucleotide contains a methylene bridge that connects the 2′-oxygen of ribose with the 4′-carbon of ribose. Oligonucleotides containing the locked nucleotide are described in Koshkin, A. A., et al., Tetrahedron (1998), 54: 3607-3630) and Obika, S. et al., Tetrahedron Lett. (1998), 39: 5401-5404). Introduction of a locked nucleotide into an oligonucleotide improves the affinity for complementary sequences and increases the melting temperature by several degrees (Braasch, D. A. and D. R. Corey, Chem. Biol. (2001), 8:1-7).

[0087] Conjugating a ligand to a dsRNA can enhance its cellular absorption as well as targeting to a particular tissue or uptake by specific types of cells such as liver cells. In certain instances, a hydrophobic ligand is conjugated to the dsRNA to facilitate direct permeation of the cellular membrane and or uptake across the liver cells. Alternatively, the ligand conjugated to the dsRNA is a substrate for receptor-mediated endocytosis. These approaches have been used to facilitate cell permeation of antisense oligonucleotides as well as dsRNA agents. For example, cholesterol has been conjugated to various antisense oligonucleotides resulting in compounds that are substantially more active compared to their non-conjugated analogs. See M. Manoharan Antisense & Nucleic Acid Drug Development 2002, 12, 103. Other lipophilic compounds that have been conjugated to oligonucleotides include 1-pyrene butyric acid, 1,3-bis-O-(hexadecyl)glycerol, and menthol. One example of a ligand for receptor-mediated endocytosis is folic acid. Folic acid enters the cell by folate-receptor-mediated endocytosis. dsRNA compounds bearing folic acid would be efficiently transported into the cell via the folate-receptor-mediated endocytosis. Li and coworkers report that attachment of folic acid to the 3′-terminus of an oligonucleotide resulted in an 8-fold increase in cellular uptake of the oligonucleotide. Li, S.; Deshmukh, H. M.; Huang, L. Pharm. Res. 1998, 15, 1540. Other ligands that have been conjugated to oligonucleotides include polyethylene glycols, carbohydrate clusters, cross-linking agents, porphyrin conjugates, delivery peptides and lipids such as cholesterol and cholesterylamine. Examples of carbohydrate clusters include Chol-p-(GalNAc)₃ (N-acetyl galactosamine cholesterol) and LCO(GalNAc)₃ (N-acetyl galactosamine-3′-Lithocholic-oleoyl.

[0088] In certain instances, conjugation of a cationic ligand to oligonucleotides results in improved resistance to nucleases. Representative examples of cationic ligands are propylammonium and dimethylpropylammonium. Interestingly, antisense oligonucleotides were reported to retain their high binding affinity to mRNA when the cationic ligand was dispersed throughout the oligonucleotide. See M. Manoharan Antisense & Nucleic Acid Drug Development 2002, 12, 103 and references therein.

[0089] In some cases, a ligand can be multifunctional and/or a dsRNA can be conjugated to more than one ligand. For example, the dsRNA can be conjugated to one ligand for improved uptake and to a second ligand for improved release.

[0090] The ligand-conjugated dsRNA of the invention may be synthesized by the use of a dsRNA that bears a pendant reactive functionality, such as that derived from the attachment of a linking molecule onto the dsRNA. This reactive oligonucleotide may be reacted directly with commercially-available ligands, ligands that are synthesized bearing any of a variety of protecting groups, or ligands that have a linking moiety attached thereto. The methods of the invention facilitate the synthesis of ligand-conjugated dsRNA by the use of, in some embodiments, nucleoside monomers that have been appropriately conjugated with ligands and that may further be attached to a solid-support material. Such ligand-nucleoside conjugates, optionally attached to a solid-support material, are prepared according to certain embodiments of the methods described herein via reaction of a selected serum-binding ligand with a linking moiety located on the 5′ position of a nucleoside or oligonucleotide. In certain instances, a dsRNA bearing an aralkyl ligand attached to the 3′-terminus of the dsRNA is prepared by first covalently attaching a monomer building block to a controlled-pore-glass support via a long-chain aminoalkyl group. Then, nucleotides are bonded via standard solid-phase synthesis techniques to the monomer building-block bound to the solid support. The monomer building block may be a nucleoside or other organic compound that is compatible with solid-phase synthesis.

[0091] The dsRNA used in the conjugates of the invention may be conveniently and routinely made through the well-known technique of solid-phase synthesis. Equipment for such synthesis is sold by several vendors including, for example, Applied Biosystems (Foster City, Calif.). Any other means for such synthesis known in the art may additionally or alternatively be employed. It is also known to use similar techniques to prepare other oligonucleotides, such as the phosphorothioates and alkylated derivatives.

[0092] Synthesis

[0093] Teachings regarding the synthesis of particular modified oligonucleotides may be found in the following U.S. Pat. Nos. 5,138,045 and 5,218,105, drawn to polyamine conjugated oligonucleotides; U.S. Pat. No. 5,212,295, drawn to monomers for the preparation of oligonucleotides having chiral phosphorus linkages; U.S. Pat. Nos. 5,378,825 and 5,541,307, drawn to oligonucleotides having modified backbones; U.S. Pat. No. 5,386,023, drawn to backbone-modified oligonucleotides and the preparation thereof through reductive coupling; U.S. Pat. No. 5,457,191, drawn to modified nucleobases based on the 3-deazapurine ring system and methods of synthesis thereof; U.S. Pat. No. 5,459,255, drawn to modified nucleobases based on N-2 substituted purines; U.S. Pat. No. 5,521,302, drawn to processes for preparing oligonucleotides having chiral phosphorus linkages; U.S. Pat. No. 5,539,082, drawn to peptide nucleic acids; U.S. Pat. No. 5,554,746, drawn to oligonucleotides having β-lactam backbones; U.S. Pat. No. 5,571,902, drawn to methods and materials for the synthesis of oligonucleotides; U.S. Pat. No. 5,578,718, drawn to nucleosides having alkylthio groups, wherein such groups may be used as linkers to other moieties attached at any of a variety of positions of the nucleoside; U.S. Pat. Nos. 5,587,361 and 5,599,797, drawn to oligonucleotides having phosphorothioate linkages of high chiral purity; U.S. Pat. No. 5,506,351, drawn to processes for the preparation of 2′-O-alkyl guanosine and related compounds, including 2,6-diaminopurine compounds; U.S. Pat. No. 5,587,469, drawn to oligonucleotides having N-2 substituted purines; U.S. Pat. No. 5,587,470, drawn to oligonucleotides having 3-deazapurines; U.S. Pat. No. 5,223,168, and U.S. Pat. No. 5,608,046, both drawn to conjugated 4′-desmethyl nucleoside analogs; U.S. Pat. Nos. 5,602,240, and 5,610,289, drawn to backbone-modified oligonucleotide analogs; U.S. Pat. Nos. 6,262,241, and 5,459,255, drawn to, inter alia, methods of synthesizing 2′-fluoro-oligonucleotides.

[0094] In the ligand-conjugated dsRNA and ligand-molecule bearing sequence-specific linked nucleosides of the invention, the oligonucleotides and oligonucleosides may be assembled on a suitable DNA synthesizer utilizing standard nucleotide or nucleoside precursors, or nucleotide or nucleoside conjugate precursors that already bear the linking moiety, ligand-nucleotide or nucleoside-conjugate precursors that already bear the ligand molecule, or non-nucleoside ligand-bearing building blocks.

[0095] When using nucleotide-conjugate precursors that already bear a linking moiety, the synthesis of the sequence-specific linked nucleosides is typically completed, and the ligand molecule is then reacted with the linking moiety to form the ligand-conjugated oligonucleotide. Oligonucleotide conjugates bearing a variety of molecules such as steroids, vitamins, lipids and reporter molecules, has previously been described (see Manoharan et al., PCT Application WO 93/07883). In one embodiment, the oligonucleotides or linked nucleosides featured in the invention are synthesized by an automated synthesizer using phosphoramidites derived from ligand-nucleoside conjugates in addition to the standard phosphoramidites and non-standard phosphoramidites that are commercially available and routinely used in oligonucleotide synthesis.

[0096] The incorporation of a 2′-O-methyl, 2′-O-ethyl, 2′-O-propyl, 2′-O-allyl, 2′-O-aminoalkyl or 2′-deoxy-2′-fluoro group in nucleosides of an oligonucleotide confers enhanced hybridization properties to the oligonucleotide. Further, oligonucleotides containing phosphorothioate backbones have enhanced nuclease stability. Thus, functionalized, linked nucleosides of the invention can be augmented to include either or both a phosphorothioate backbone or a 2′-O-methyl, 2′-O-ethyl, 2′-O-propyl, 2′-O-aminoalkyl, 2′-O-allyl or 2′-deoxy-2′-fluoro group. A summary listing of some of the oligonucleotide modifications known in the art is found at, for example, PCT Publication WO 200370918.

[0097] In some embodiments, functionalized nucleoside sequences of the invention possessing an amino group at the 5′-terminus are prepared using a DNA synthesizer, and then reacted with an active ester derivative of a selected ligand. Active ester derivatives are well known to those skilled in the art. Representative active esters include N-hydrosuccinimide esters, tetrafluorophenolic esters, pentafluorophenolic esters and pentachlorophenolic esters. The reaction of the amino group and the active ester produces an oligonucleotide in which the selected ligand is attached to the 5′-position through a linking group. The amino group at the 5′-terminus can be prepared utilizing a 5′-Amino-Modifier C6 reagent. In one embodiment, ligand molecules may be conjugated to oligonucleotides at the 5′-position by the use of a ligand-nucleoside phosphoramidite wherein the ligand is linked to the 5′-hydroxy group directly or indirectly via a linker. Such ligand-nucleoside phosphoramidites are typically used at the end of an automated synthesis procedure to provide a ligand-conjugated oligonucleotide bearing the ligand at the 5′-terminus.

[0098] Examples of modified internucleoside linkages or backbones include, for example, phosphorothioates, chiral phosphorothioates, phosphorodithioates, phosphotriesters, aminoalkylphosphotriesters, methyl and other alkyl phosphonates including 3′-alkylene phosphonates and chiral phosphonates, phosphinates, phosphoramidates including 3′-amino phosphoramidate and aminoalkylphosphoramidates, thionophosphoramidates, thionoalkylphosphonates, thionoalkylphosphotriesters, and boranophosphates having normal 3′-5′ linkages, 2′-5′ linked analogs of these, and those having inverted polarity wherein the adjacent pairs of nucleoside units are linked 3′-5′ to 5′-3′ or 2′-5′ to 5′-2′. Various salts, mixed salts and free-acid forms are also included.

[0099] Representative United States Patents relating to the preparation of the above phosphorus-atom-containing linkages include, but are not limited to, U.S. Pat. Nos. 3,687,808; 4,469,863; 4,476,301; 5,023,243; 5,177,196; 5,188,897; 5,264,423; 5,276,019; 5,278,302; 5,286,717; 5,321,131; 5,399,676; 5,405,939; 5,453,496; 5,455,233; 5,466,677; 5,476,925; 5,519,126; 5,536,821; 5,541,306; 5,550,111; 5,563,253; 5,571,799; 5,587,361; 5,625,050; and 5,697,248, each of which is herein incorporated by reference.

[0100] Examples of modified internucleoside linkages or backbones that do not include a phosphorus atom therein (i.e., oligonucleosides) have backbones that are formed by short chain alkyl or cycloalkyl intersugar linkages, mixed heteroatom and alkyl or cycloalkyl intersugar linkages, or one or more short chain heteroatomic or heterocyclic intersugar linkages. These include those having morpholino linkages (formed in part from the sugar portion of a nucleoside); siloxane backbones; sulfide, sulfoxide and sulfone backbones; formacetyl and thioformacetyl backbones; methylene formacetyl and thioformacetyl backbones; alkene containing backbones; sulfamate backbones; methyleneimino and methylenehydrazino backbones; sulfonate and sulfonamide backbones; amide backbones; and others having mixed N, O, S and CH₂ component parts.

[0101] Representative United States patents relating to the preparation of the above oligonucleosides include, but are not limited to, U.S. Pat. Nos. 5,034,506; 5,166,315; 5,185,444; 5,214,134; 5,216,141; 5,235,033; 5,264,562; 5,264,564; 5,405,938; 5,434,257; 5,466,677; 5,470,967; 5,489,677; 5,541,307; 5,561,225; 5,596,086; 5,602,240; 5,610,289; 5,602,240; 5,608,046; 5,610,289; 5,618,704; 5,623,070; 5,663,312; 5,633,360; 5,677,437; and 5,677,439, each of which is herein incorporated by reference.

[0102] In certain instances, the oligonucleotide may be modified by a non-ligand group. A number of non-ligand molecules have been conjugated to oligonucleotides in order to enhance the activity, cellular distribution or cellular uptake of the oligonucleotide, and procedures for performing such conjugations are available in the scientific literature. Such non-ligand moieties have included lipid moieties, such as cholesterol (Letsinger et al., Proc. Natl. Acad. Sci. USA, 1989, 86:6553), cholic acid (Manoharan et al., Bioorg. Med. Chem. Lett., 1994, 4:1053), a thioether, e.g., hexyl-5-tritylthiol (Manoharan et al., Ann. N.Y. Acad. Sci., 1992, 660:306; Manoharan et al., Bioorg. Med. Chem. Let., 1993, 3:2765), a thiocholesterol (Oberhauser et al., Nucl. Acids Res., 1992, 20:533), an aliphatic chain, e.g., dodecandiol or undecyl residues (Saison-Behmoaras et al., EMBO J., 1991, 10:111; Kabanov et al., FEBS Lett., 1990, 259:327; Svinarchuk et al., Biochimie, 1993, 75:49), a phospholipid, e.g., di-hexadecyl-rac-glycerol or triethylammonium 1,2-di-O-hexadecyl-rac-glycero-3-H-phosphonate (Manoharan et al., Tetrahedron Lett., 1995, 36:3651; Shea et al., Nucl. Acids Res., 1990, 18:3777), a polyamine or a polyethylene glycol chain (Manoharan et al., Nucleosides & Nucleotides, 1995, 14:969), or adamantane acetic acid (Manoharan et al., Tetrahedron Lett., 1995, 36:3651), a palmityl moiety (Mishra et al., Biochim. Biophys. Acta, 1995, 1264:229), or an octadecylamine or hexylamino-carbonyl-oxycholesterol moiety (Crooke et al., J. Pharmacol. Exp. Ther., 1996, 277:923). Representative United States patents that teach the preparation of such oligonucleotide conjugates have been listed above. Typical conjugation protocols involve the synthesis of oligonucleotides bearing an aminolinker at one or more positions of the sequence. The amino group is then reacted with the molecule being conjugated using appropriate coupling or activating reagents. The conjugation reaction may be performed either with the oligonucleotide still bound to the solid support or following cleavage of the oligonucleotide in solution phase. Purification of the oligonucleotide conjugate by HPLC typically affords the pure conjugate. The use of a cholesterol conjugate is particularly preferred since such a moiety can increase targeting liver cells, a site of PCSK9 expression.

[0103] Vector Encoded RNAi Agents

[0104] In another aspect of the invention, PCSK9 specific dsRNA molecules that modulate PCSK9 gene expression activity are expressed from transcription units inserted into DNA or RNA vectors (see, e.g., Couture, A, et al., TIG. (1996), 12:5-10; Skillern, A., et al., International PCT Publication No. WO 00/22113, Conrad, International PCT Publication No. WO 00/22114, and Conrad, U.S. Pat. No. 6,054,299). These transgenes can be introduced as a linear construct, a circular plasmid, or a viral vector, which can be incorporated and inherited as a transgene integrated into the host genome. The transgene can also be constructed to permit it to be inherited as an extrachromosomal plasmid (Gassmann, et al., Proc. Natl. Acad. Sci. USA (1995) 92:1292).

[0105] The individual strands of a dsRNA can be transcribed by promoters on two separate expression vectors and co-transfected into a target cell. Alternatively each individual strand of the dsRNA can be transcribed by promoters both of which are located on the same expression plasmid. In one embodiment, a dsRNA is expressed as an inverted repeat joined by a linker polynucleotide sequence such that the dsRNA has a stem and loop structure.

[0106] The recombinant dsRNA expression vectors are generally DNA plasmids or viral vectors. dsRNA expressing viral vectors can be constructed based on, but not limited to, adeno-associated virus (for a review, see Muzyczka, et al., Curr. Topics Micro. Immunol. (1992) 158:97-129)); adenovirus (see, for example, Berkner, et al., BioTechniques (1998) 6:616), Rosenfeld et al. (1991, Science 252:431-434), and Rosenfeld et al. (1992), Cell 68:143-155)); or alphavirus as well as others known in the art. Retroviruses have been used to introduce a variety of genes into many different cell types, including epithelial cells, in vitro and/or in vivo (see, e.g., Eglitis, et al., Science (1985) 230:1395-1398; Danos and Mulligan, Proc. Natl. Acad. Sci. USA (1998) 85:6460-6464; Wilson et al., 1988, Proc. Natl. Acad. Sci. USA 85:3014-3018; Armentano et al., 1990, Proc. Natl. Acad. Sci. USA 87:61416145; Huber et al., 1991, Proc. Natl. Acad. Sci. USA 88:8039-8043; Ferry et al., 1991, Proc. Natl. Acad. Sci. USA 88:8377-8381; Chowdhury et al., 1991, Science 254:1802-1805; van Beusechem. et al., 1992, Proc. Nad. Acad. Sci. USA 89:7640-19; Kay et al., 1992, Human Gene Therapy 3:641-647; Dai et al., 1992, Proc. Natl. Acad. Sci. USA 89:10892-10895; Hwu et al., 1993, J. Immunol. 150:4104-4115; U.S. Pat. No. 4,868,116; U.S. Pat. No. 4,980,286; PCT Application WO 89/07136; PCT Application WO 89/02468; PCT Application WO 89/05345; and PCT Application WO 92/07573). Recombinant retroviral vectors capable of transducing and expressing genes inserted into the genome of a cell can be produced by transfecting the recombinant retroviral genome into suitable packaging cell lines such as PA317 and Psi-CRIP (Comette et al., 1991, Human Gene Therapy 2:5-10; Cone et al., 1984, Proc. Natl. Acad. Sci. USA 81:6349). Recombinant adenoviral vectors can be used to infect a wide variety of cells and tissues in susceptible hosts (e.g., rat, hamster, dog, and chimpanzee) (Hsu et al., 1992, J. Infectious Disease, 166:769), and also have the advantage of not requiring mitotically active cells for infection.

[0107] Any viral vector capable of accepting the coding sequences for the dsRNA molecule(s) to be expressed can be used, for example vectors derived from adenovirus (AV); adeno-associated virus (AAV); retroviruses (e.g., lentiviruses (LV), Rhabdoviruses, murine leukemia virus); herpes virus, and the like. The tropism of viral vectors can be modified by pseudotyping the vectors with envelope proteins or other surface antigens from other viruses, or by substituting different viral capsid proteins, as appropriate.

[0108] For example, lentiviral vectors of the invention can be pseudotyped with surface proteins from vesicular stomatitis virus (VSV), rabies, Ebola, Mokola, and the like. AAV vectors of the invention can be made to target different cells by engineering the vectors to express different capsid protein serotypes. For example, an AAV vector expressing a serotype 2 capsid on a serotype 2 genome is called AAV 2/2. This serotype 2 capsid gene in the AAV 2/2 vector can be replaced by a serotype 5 capsid gene to produce an AAV 2/5 vector. Techniques for constructing AAV vectors which express different capsid protein serotypes are within the skill in the art; see, e.g., Rabinowitz J E et al. (2002), J Virol 76:791-801, the entire disclosure of which is herein incorporated by reference.

[0109] Selection of recombinant viral vectors suitable for use in the invention, methods for inserting nucleic acid sequences for expressing the dsRNA into the vector, and methods of delivering the viral vector to the cells of interest are within the skill in the art. See, for example, Dornburg R (1995), Gene Therap. 2: 301-310; Eglitis M A (1988), Biotechniques 6: 608-614; Miller A D (1990), Hum Gene Therap. 1: 5-14; Anderson W F (1998), Nature 392: 25-30; and Rubinson D A et al., Nat. Genet. 33: 401-406, the entire disclosures of which are herein incorporated by reference.

[0110] Preferred viral vectors are those derived from AV and AAV. In a particularly preferred embodiment, the dsRNA of the invention is expressed as two separate, complementary single-stranded RNA molecules from a recombinant AAV vector having, for example, either the U6 or H1 RNA promoters, or the cytomegalovirus (CMV) promoter.

[0111] A suitable AV vector for expressing the dsRNA of the invention, a method for constructing the recombinant AV vector, and a method for delivering the vector into target cells, are described in Xia H et al. (2002), Nat. Biotech. 20: 1006-1010.

[0112] Suitable AAV vectors for expressing the dsRNA of the invention, methods for constructing the recombinant AV vector, and methods for delivering the vectors into target cells are described in Samulski R et al. (1987), J. Virol. 61: 3096-3101; Fisher K J et al. (1996), J. Virol, 70: 520-532; Samulski R et al. (1989), J. Virol. 63: 3822-3826; U.S. Pat. No. 5,252,479; U.S. Pat. No. 5,139,941; International Patent Application No. WO 94/13788; and International Patent Application No. WO 93/24641, the entire disclosures of which are herein incorporated by reference.

[0113] The promoter driving dsRNA expression in either a DNA plasmid or viral vector of the invention may be a eukaryotic RNA polymerase I (e.g. ribosomal RNA promoter), RNA polymerase II (e.g. CMV early promoter or actin promoter or U1 snRNA promoter) or generally RNA polymerase III promoter (e.g. U6 snRNA or 7SK RNA promoter) or a prokaryotic promoter, for example the T7 promoter, provided the expression plasmid also encodes T7 RNA polymerase required for transcription from a T7 promoter. The promoter can also direct transgene expression to the pancreas (see, e.g., the insulin regulatory sequence for pancreas (Bucchini et al., 1986, Proc. Natl. Acad. Sci. USA 83:2511-2515)).

[0114] In addition, expression of the transgene can be precisely regulated, for example, by using an inducible regulatory sequence and expression systems such as a regulatory sequence that is sensitive to certain physiological regulators, e.g., circulating glucose levels, or hormones (Docherty et al., 1994, FASEB J. 8:20-24). Such inducible expression systems, suitable for the control of transgene expression in cells or in mammals include regulation by ecdysone, by estrogen, progesterone, tetracycline, chemical inducers of dimerization, and isopropyl-beta-D1-thiogalactopyranoside (EPTG). A person skilled in the art would be able to choose the appropriate regulatory/promoter sequence based on the intended use of the dsRNA transgene.

[0115] Generally, recombinant vectors capable of expressing dsRNA molecules are delivered as described below, and persist in target cells. Alternatively, viral vectors can be used that provide for transient expression of dsRNA molecules. Such vectors can be repeatedly administered as necessary. Once expressed, the dsRNAs bind to target RNA and modulate its function or expression. Delivery of dsRNA expressing vectors can be systemic, such as by intravenous or intramuscular administration, by administration to target cells ex-planted from the patient followed by reintroduction into the patient, or by any other means that allows for introduction into a desired target cell.

[0116] dsRNA expression DNA plasmids are typically transfected into target cells as a complex with cationic lipid carriers (e.g. Oligofectamine) or non-cationic lipid-based carriers (e.g. Transit-TKO™). Multiple lipid transfections for dsRNA-mediated knockdowns targeting different regions of a single PCSK9 gene or multiple PCSK9 genes over a period of a week or more are also contemplated by the invention. Successful introduction of the vectors of the invention into host cells can be monitored using various known methods. For example, transient transfection. can be signaled with a reporter, such as a fluorescent marker, such as Green Fluorescent Protein (GFP). Stable transfection of ex vivo cells can be ensured using markers that provide the transfected cell with resistance to specific environmental factors (e.g., antibiotics and drugs), such as hygromycin B resistance.

[0117] The PCSK9 specific dsRNA molecules can also be inserted into vectors and used as gene therapy vectors for human patients. Gene therapy vectors can be delivered to a subject by, for example, intravenous injection, local administration (see U.S. Pat. No. 5,328,470) or by stereotactic injection (see e.g., Chen et al. (1994) Proc. Natl. Acad. Sci. USA 91:3054-3057). The pharmaceutical preparation of the gene therapy vector can include the gene therapy vector in an acceptable diluent, or can include a slow release matrix in which the gene delivery vehicle is imbedded. Alternatively, where the complete gene delivery vector can be produced intact from recombinant cells, e.g., retroviral vectors, the pharmaceutical preparation can include one or more cells which produce the gene delivery system.

[0118] Pharmaceutical Compositions Containing dsRNA

[0119] In one embodiment, the invention provides pharmaceutical compositions containing a dsRNA, as described herein, and a pharmaceutically acceptable carrier and methods of administering the same. The pharmaceutical composition containing the dsRNA is useful for treating a disease or disorder associated with the expression or activity of a PCSK9 gene, such as pathological processes mediated by PCSK9 expression, e.g., hyperlipidemia. Such pharmaceutical compositions are formulated based on the mode of delivery.

[0120] Dosage

[0121] The pharmaceutical compositions featured herein are administered in dosages sufficient to inhibit expression of PCSK9 genes. In general, a suitable dose of dsRNA will be in the range of 0.01 to 200.0 milligrams per kilogram body weight of the recipient per day, generally in the range of 1 to 50 mg per kilogram body weight per day. For example, the dsRNA can be administered at 0.01 mg/kg, 0.05 mg/kg, 0.5 mg/kg, 1 mg/kg, 1.5 mg/kg, 2 mg/kg, 3 mg/kg, 5.0 mg/kg, 10 mg/kg, 20 mg/kg, 30 mg/kg, 40 mg/kg, or 50 mg/kg per single dose.

[0122] The pharmaceutical composition can be administered once daily, or the dsRNA may be administered as two, three, or more sub-doses at appropriate intervals throughout the day. The effect of a single dose on PCSK9 levels is long lasting, such that subsequent doses are administered at not more than 7 day intervals, or at not more than 1, 2, 3, or 4 week intervals.

[0123] In some embodiments the dsRNA is administered using continuous infusion or delivery through a controlled release formulation. In that case, the dsRNA contained in each sub-dose must be correspondingly smaller in order to achieve the total daily dosage. The dosage unit can also be compounded for delivery over several days, e.g., using a conventional sustained release formulation which provides sustained release of the dsRNA over a several day period. Sustained release formulations are well known in the art and are particularly useful for delivery of agents at a particular site, such as could be used with the agents of the present invention. In this embodiment, the dosage unit contains a corresponding multiple of the daily dose.

[0124] The skilled artisan will appreciate that certain factors may influence the dosage and timing required to effectively treat a subject, including but not limited to the severity of the disease or disorder, previous treatments, the general health and/or age of the subject, and other diseases present. Moreover, treatment of a subject with a therapeutically effective amount of a composition can include a single treatment or a series of treatments. Estimates of effective dosages and in vivo half-lives for the individual dsRNAs encompassed by the invention can be made using conventional methodologies or on the basis of in vivo testing using an appropriate animal model, as described elsewhere herein.

[0125] Advances in mouse genetics have generated a number of mouse models for the study of various human diseases, such as pathological processes mediated by PCSK9 expression. Such models are used for in vivo testing of dsRNA, as well as for determining a therapeutically effective dose. A suitable mouse model is, for example, a mouse containing a plasmid expressing human PCSK9. Another suitable mouse model is a transgenic mouse carrying a transgene that expresses human PCSK9.

[0126] Toxicity and therapeutic efficacy of such compounds can be determined by standard pharmaceutical procedures in cell cultures or experimental animals, e.g., for determining the LD50 (the dose lethal to 50% of the population) and the ED50 (the dose therapeutically effective in 50% of the population). The dose ratio between toxic and therapeutic effects is the therapeutic index and it can be expressed as the ratio LD50/ED50. Compounds that exhibit high therapeutic indices are preferred.

[0127] The data obtained from cell culture assays and animal studies can be used in formulating a range of dosage for use in humans. The dosage of compositions featured in the invention lies generally within a range of circulating concentrations that include the ED50 with little or no toxicity. The dosage may vary within this range depending upon the dosage form employed and the route of administration utilized. For any compound used in the methods featured in the invention, the therapeutically effective dose can be estimated initially from cell culture assays. A dose may be formulated in animal models to achieve a circulating plasma concentration range of the compound or, when appropriate, of the polypeptide product of a target sequence (e.g., achieving a decreased concentration of the polypeptide) that includes the IC50 (i.e., the concentration of the test compound which achieves a half-maximal inhibition of symptoms) as determined in cell culture. Such information can be used to more accurately determine useful doses in humans. Levels in plasma may be measured, for example, by high performance liquid chromatography.

[0128] In addition to their administration, as discussed above, the dsRNAs featured in the invention can be administered in combination with other known agents effective in treatment of pathological processes mediated by target gene expression. In any event, the administering physician can adjust the amount and timing of dsRNA administration on the basis of results observed using standard measures of efficacy known in the art or described herein.

[0129] Administration

[0130] The pharmaceutical compositions of the present invention may be administered in a number of ways depending upon whether local or systemic treatment is desired and upon the area to be treated. Administration may be topical, pulmonary, e.g., by inhalation or insufflation of powders or aerosols, including by nebulizer; intratracheal, intranasal, epidermal and transdermal, and subdermal, oral or parenteral, e.g., subcutaneous.

[0131] Typically, when treating a mammal with hyperlipidemia, the dsRNA molecules are administered systemically via parental means. Parenteral administration includes intravenous, intra-arterial, subcutaneous, intraperitoneal or intramuscular injection or infusion; or intracranial, e.g., intraparenchymal, intrathecal or intraventricular, administration. For example, dsRNAs, conjugated or unconjugate or formulated with or without liposomes, can be administered intravenously to a patient. For such, a dsRNA molecule can be formulated into compositions such as sterile and non-sterile aqueous solutions, non-aqueous solutions in common solvents such as alcohols, or solutions in liquid or solid oil bases. Such solutions also can contain buffers, diluents, and other suitable additives. For parenteral, intrathecal, or intraventricular administration, a dsRNA molecule can be formulated into compositions such as sterile aqueous solutions, which also can contain buffers, diluents, and other suitable additives (e.g., penetration enhancers, carrier compounds, and other pharmaceutically acceptable carriers). Formulations are described in more detail herein.

[0132] The dsRNA can be delivered in a manner to target a particular tissue, such as the liver (e.g., the hepatocytes of the liver).

[0133] Formulations

[0134] The pharmaceutical formulations of the present invention, which may conveniently be presented in unit dosage form, may be prepared according to conventional techniques well known in the pharmaceutical industry. Such techniques include the step of bringing into association the active ingredients with the pharmaceutical carrier(s) or excipient(s). In general, the formulations are prepared by uniformly and intimately bringing into association the active ingredients with liquid carriers or finely divided solid carriers or both, and then, if necessary, shaping the product.

[0135] The compositions of the present invention may be formulated into any of many possible dosage forms such as, but not limited to, tablets, capsules, gel capsules, liquid syrups, soft gels, suppositories, and enemas. The compositions of the present invention may also be formulated as suspensions in aqueous, non-aqueous or mixed media. Aqueous suspensions may further contain substances which increase the viscosity of the suspension including, for example, sodium carboxymethylcellulose, sorbitol and/or dextran. The suspension may also contain stabilizers.

[0136] Pharmaceutical compositions of the present invention include, but are not limited to, solutions, emulsions, and liposome-containing formulations. These compositions may be generated from a variety of components that include, but are not limited to, preformed liquids, self-emulsifying solids and self-emulsifying semisolids. In one aspect are formulations that target the liver when treating hepatic disorders such as hyperlipidemia.

[0137] In addition, dsRNA that target the PCSK9 gene can be formulated into compositions containing the dsRNA admixed, encapsulated, conjugated, or otherwise associated with other molecules, molecular structures, or mixtures of nucleic acids. For example, a composition containing one or more dsRNA agents that target the PCSK9 gene can contain other therapeutic agents such as other lipid lowering agents (e.g., statins) or one or more dsRNA compounds that target non-PCSK9 genes.

[0138] Oral, Parenteral, Topical, and Biologic Formulations

[0139] Compositions and formulations for oral administration include powders or granules, microparticulates, nanoparticulates, suspensions or solutions in water or non-aqueous media, capsules, gel capsules, sachets, tablets or minitablets. Thickeners, flavoring agents, diluents, emulsifiers, dispersing aids or binders may be desirable. In some embodiments, oral formulations are those in which dsRNAs featured in the invention are administered in conjunction with one or more penetration enhancers surfactants and chelators. Suitable surfactants include fatty acids and/or esters or salts thereof, bile acids and/or salts thereof. Suitable bile acids/salts include chenodeoxycholic acid (CDCA) and ursodeoxychenodeoxycholic acid (UDCA), cholic acid, dehydrocholic acid, deoxycholic acid, glucholic acid, glycholic acid, glycodeoxycholic acid, taurocholic acid, taurodeoxycholic acid, sodium tauro-24,25-dihydro-fusidate and sodium glycodihydrofusidate. Suitable fatty acids include arachidonic acid, undecanoic acid, oleic acid, lauric acid, caprylic acid, capric acid, myristic acid, palmitic acid, stearic acid, linoleic acid, linolenic acid, dicaprate, tricaprate, monoolein, dilaurin, glyceryl 1-monocaprate, 1-dodecylazacycloheptan-2-one, an acylcarnitine, an acylcholine, or a monoglyceride, a diglyceride or a pharmaceutically acceptable salt thereof (e.g., sodium). In some embodiments, combinations of penetration enhancers are used, for example, fatty acids/salts in combination with bile acids/salts. One exemplary combination is the sodium salt of lauric acid, capric acid and UDCA. Further penetration enhancers include polyoxyethylene-9-lauryl ether, polyoxyethylene-20-cetyl ether. DsRNAs featured in the invention may be delivered orally, in granular form including sprayed dried particles, or complexed to form micro or nanoparticles. DsRNA complexing agents include poly-amino acids; polyimines; polyacrylates; polyalkylacrylates, polyoxethanes, polyalkylcyanoacrylates; cationized gelatins, albumins, starches, acrylates, polyethyleneglycols (PEG) and starches; polyalkylcyanoacrylates; DEAE-derivatized polyimines, pollulans, celluloses and starches. Suitable complexing agents include chitosan, N-trimethylchitosan, poly-L-lysine, polyhistidine, polyornithine, polyspermines, protamine, polyvinylpyridine, polythiodiethylaminomethylethylene P(TDAE), polyaminostyrene (e.g., p-amino), poly(methylcyanoacrylate), poly(ethylcyanoacrylate), poly(butylcyanoacrylate), poly(isobutylcyanoacrylate), poly(isohexylcynaoacrylate), DEAE-methacrylate, DEAE-hexylacrylate, DEAE-acrylamide, DEAE-albumin and DEAE-dextran, polymethylacrylate, polyhexylacrylate, poly(D,L-lactic acid), poly(DL-lactic-co-glycolic acid (PLGA), alginate, and polyethyleneglycol (PEG). Oral formulations for dsRNAs and their preparation are described in detail in U.S. Pat. No. 6,887,906, U.S. patent publication. No. 20030027780, and U.S. Pat. No. 6,747,014, each of which is incorporated herein by reference.

[0140] Compositions and formulations for parenteral, intraparenchymal (into the brain), intrathecal, intraventricular or intrahepatic administration may include sterile aqueous solutions which may also contain buffers, diluents and other suitable additives such as, but not limited to, penetration enhancers, carrier compounds and other pharmaceutically acceptable carriers or excipients.

[0141] Pharmaceutical compositions and formulations for topical administration may include transdermal patches, ointments, lotions, creams, gels, drops, suppositories, sprays, liquids and powders. Conventional pharmaceutical carriers, aqueous, powder or oily bases, thickeners and the like may be necessary or desirable. Suitable topical formulations include those in which the dsRNAs featured in the invention are in admixture with a topical delivery agent such as lipids, liposomes, fatty acids, fatty acid esters, steroids, chelating agents and surfactants. Suitable lipids and liposomes include neutral (e.g., dioleoylphosphatidyl DOPE ethanolamine, dimyristoylphosphatidyl choline DMPC, distearolyphosphatidyl choline) negative (e.g., dimyristoylphosphatidyl glycerol DMPG) and cationic (e.g., dioleoyltetramethylaminopropyl DOTAP and dioleoylphosphatidyl ethanolamine DOTMA). DsRNAs featured in the invention may be encapsulated within liposomes or may form complexes thereto, in particular to cationic liposomes. Alternatively, dsRNAs may be complexed to lipids, in particular to cationic lipids. Suitable fatty acids and esters include but are not limited to arachidonic acid, oleic acid, eicosanoic acid, lauric acid, caprylic acid, capric acid, myristic acid, palmitic acid, stearic acid, linoleic acid, linolenic acid, dicaprate, tricaprate, monoolein, dilaurin, glyceryl 1-monocaprate, 1-dodecylazacycloheptan-2-one, an acylcarnitine, an acylcholine, or a C₁₋₁₀ alkyl ester (e.g., isopropylmyristate IPM), monoglyceride, diglyceride or pharmaceutically acceptable salt thereof. Topical formulations are described in detail in U.S. Pat. No. 6,747,014, which is incorporated herein by reference. In addition, dsRNA molecules can be administered to a mammal as biologic or abiologic means as described in, for example, U.S. Pat. No. 6,271,359. Abiologic delivery can be accomplished by a variety of methods including, without limitation, (1) loading liposomes with a dsRNA acid molecule provided herein and (2) complexing a dsRNA molecule with lipids or liposomes to form nucleic acid-lipid or nucleic acid-liposome complexes. The liposome can be composed of cationic and neutral lipids commonly used to transfect cells in vitro. Cationic lipids can complex (e.g., charge-associate) with negatively charged nucleic acids to form liposomes. Examples of cationic liposomes include, without limitation, lipofectin, lipofectamine, lipofectace, and DOTAP. Procedures for forming liposomes are well known in the art. Liposome compositions can be formed, for example, from phosphatidylcholine, dimyristoyl phosphatidylcholine, dipalmitoyl phosphatidylcholine, dimyristoyl phosphatidylglycerol, or dioleoyl phosphatidylethanolamine. Numerous lipophilic agents are commercially available, including Lipofectin™ (Invitrogen/Life Technologies, Carlsbad, Calif.) and Effectene™ (Qiagen, Valencia, Calif.). In addition, systemic delivery methods can be optimized using commercially available cationic lipids such as DDAB or DOTAP, each of which can be mixed with a neutral lipid such as DOPE or cholesterol. In some cases, liposomes such as those described by Templeton et al. (Nature Biotechnology, 15: 647-652 (1997)) can be used. In other embodiments, polycations such as polyethyleneimine can be used to achieve delivery in vivo and ex vivo (Boletta et al., J. Am. Soc. Nephrol. 7: 1728 (1996)). Additional information regarding the use of liposomes to deliver nucleic acids can be found in U.S. Pat. No. 6,271,359, PCT Publication WO 96/40964 and Morrissey, D. et al. 2005. Nat. Biotechnol. 23(8):1002-7.

[0142] Biologic delivery can be accomplished by a variety of methods including, without limitation, the use of viral vectors. For example, viral vectors (e.g., adenovirus and herpesvirus vectors) can be used to deliver dsRNA molecules to liver cells. Standard molecular biology techniques can be used to introduce one or more of the dsRNAs provided herein into one of the many different viral vectors previously developed to deliver nucleic acid to cells. These resulting viral vectors can be used to deliver the one or more dsRNAs to cells by, for example, infection.

[0143] Characterization of Formulated dsRNAs

[0144] Formulations prepared by either the standard or extrusion-free method can be characterized in similar manners. For example, formulations are typically characterized by visual inspection. They should be whitish translucent solutions free from aggregates or sediment. Particle size and particle size distribution of lipid-nanoparticles can be measured by light scattering using, for example, a Malvern Zetasizer Nano ZS (Malvern, USA). Particles should be about 20-300 nm, such as 40-100 nm in size. The particle size distribution should be unimodal. The total siRNA concentration in the formulation, as well as the entrapped fraction, is estimated using a dye exclusion assay. A sample of the formulated siRNA can be incubated with an RNA-binding dye, such as Ribogreen (Molecular Probes) in the presence or absence of a formulation disrupting surfactant, e.g., 0.5% Triton-X100. The total siRNA in the formulation can be determined by the signal from the sample containing the surfactant, relative to a standard curve. The entrapped fraction is determined by subtracting the “free” siRNA content (as measured by the signal in the absence of surfactant) from the total siRNA content. Percent entrapped siRNA is typically >85%. For SNALP formulation, the particle size is at least 30 nm, at least 40 nm, at least 50 nm, at least 60 nm, at least 70 nm, at least 80 nm, at least 90 nm, at least 100 nm, at least 110 nm, and at least 120 nm. The suitable range is typically about at least 50 nm to about at least 110 nm, about at least 60 nm to about at least 100 nm, or about at least 80 nm to about at least 90 nm.

[0145] Liposomal Formulations

[0146] There are many organized surfactant structures besides microemulsions that have been studied and used for the formulation of drugs. These include monolayers, micelles, bilayers and vesicles. Vesicles, such as liposomes, have attracted great interest because of their specificity and the duration of action they offer from the standpoint of drug delivery. As used in the present invention, the term “liposome” means a vesicle composed of amphiphilic lipids arranged in a spherical bilayer or bilayers.

[0147] Liposomes are unilamellar or multilamellar vesicles which have a membrane formed from a lipophilic material and an aqueous interior. The aqueous portion contains the composition to be delivered. Cationic liposomes possess the advantage of being able to fuse to the cell wall. Non-cationic liposomes, although not able to fuse as efficiently with the cell wall, are taken up by macrophages in vivo.

[0148] In order to cross intact mammalian skin, lipid vesicles must pass through a series of fine pores, each with a diameter less than 50 nm, under the influence of a suitable transdermal gradient. Therefore, it is desirable to use a liposome which is highly deformable and able to pass through such fine pores.

[0149] Further advantages of liposomes include; liposomes obtained from natural phospholipids are biocompatible and biodegradable; liposomes can incorporate a wide range of water and lipid soluble drugs; liposomes can protect encapsulated drugs in their internal compartments from metabolism and degradation (Rosoff, in Pharmaceutical Dosage Forms, Lieberman, Rieger and Banker (Eds.), 1988, Marcel Dekker, Inc., New York, N.Y., volume 1, p. 245). Important considerations in the preparation of liposome formulations are the lipid surface charge, vesicle size and the aqueous volume of the liposomes.

[0150] Liposomes are useful for the transfer and delivery of active ingredients to the site of action. Because the liposomal membrane is structurally similar to biological membranes, when liposomes are applied to a tissue, the liposomes start to merge with the cellular membranes and as the merging of the liposome and cell progresses, the liposomal contents are emptied into the cell where the active agent may act.

[0151] Liposomal formulations have been the focus of extensive investigation as the mode of delivery for many drugs. There is growing evidence that for topical administration, liposomes present several advantages over other formulations. Such advantages include reduced side-effects related to high systemic absorption of the administered drug, increased accumulation of the administered drug at the desired target, and the ability to administer a wide variety of drugs, both hydrophilic and hydrophobic, into the skin.

[0152] Several reports have detailed the ability of liposomes to deliver agents including high-molecular weight DNA into the skin. Compounds including analgesics, antibodies, hormones and high-molecular weight DNAs have been administered to the skin. The majority of applications resulted in the targeting of the upper epidermis

[0153] Liposomes fall into two broad classes. Cationic liposomes are positively charged liposomes which interact with the negatively charged DNA molecules to form a stable complex. The positively charged DNA/liposome complex binds to the negatively charged cell surface and is internalized in an endosome. Due to the acidic pH within the endosome, the liposomes are ruptured, releasing their contents into the cell cytoplasm (Wang et al., Biochem. Biophys. Res. Commun., 1987, 147, 980-985).

[0154] Liposomes which are pH-sensitive or negatively-charged, entrap DNA rather than complex with it. Since both the DNA and the lipid are similarly charged, repulsion rather than complex formation occurs. Nevertheless, some DNA is entrapped within the aqueous interior of these liposomes. pH-sensitive liposomes have been used to deliver DNA encoding the thymidine kinase gene to cell monolayers in culture. Expression of the exogenous gene was detected in the target cells (Zhou et al., Journal of Controlled Release, 1992, 19, 269-274).

[0155] One major type of liposomal composition includes phospholipids other than naturally-derived phosphatidylcholine. Neutral liposome compositions, for example, can be formed from dimyristoyl phosphatidylcholine (DMPC) or dipalmitoyl phosphatidylcholine (DPPC). Anionic liposome compositions generally are formed from dimyristoyl phosphatidylglycerol, while anionic fusogenic liposomes are formed primarily from dioleoyl phosphatidylethanolamine (DOPE). Another type of liposomal composition is formed from phosphatidylcholine (PC) such as, for example, soybean PC, and egg PC. Another type is formed from mixtures of phospholipid and/or phosphatidylcholine and/or cholesterol.

[0156] Several studies have assessed the topical delivery of liposomal drug formulations to the skin. Application of liposomes containing interferon to guinea pig skin resulted in a reduction of skin herpes sores while delivery of interferon via other means (e.g., as a solution or as an emulsion) were ineffective (Weiner et al., Journal of Drug Targeting, 1992, 2, 405-410). Further, an additional study tested the efficacy of interferon administered as part of a liposomal formulation to the administration of interferon using an aqueous system, and concluded that the liposomal formulation was superior to aqueous administration (du Plessis et al., Antiviral Research, 1992, 18, 259-265).

[0157] Non-ionic liposomal systems have also been examined to determine their utility in the delivery of drugs to the skin, in particular systems comprising non-ionic surfactant and cholesterol. Non-ionic liposomal formulations comprising Novasome™ I (glyceryl dilaurate/cholesterol/po-lyoxyethylene-10-stearyl ether) and Novasome™ II (glyceryl distearate/cholesterol/polyoxyethylene-10-stearyl ether) were used to deliver cyclosporin-A into the dermis of mouse skin. Results indicated that such non-ionic liposomal systems were effective in facilitating the deposition of cyclosporin-A into different layers of the skin (Hu et al. S.T.P. Pharma. Sci., 1994, 4, 6, 466).

[0158] Liposomes also include “sterically stabilized” liposomes, a term which, as used herein, refers to liposomes comprising one or more specialized lipids that, when incorporated into liposomes, result in enhanced circulation lifetimes relative to liposomes lacking such specialized lipids. Examples of sterically stabilized liposomes are those in which part of the vesicle-forming lipid portion of the liposome (A) comprises one or more glycolipids, such as monosialoganglioside G_{M1}, or (B) is derivatized with one or more hydrophilic polymers, such as a polyethylene glycol (PEG) moiety. While not wishing to be bound by any particular theory, it is thought in the art that, at least for sterically stabilized liposomes containing gangliosides, sphingomyelin, or PEG-derivatized lipids, the enhanced circulation half-life of these sterically stabilized liposomes derives from a reduced uptake into cells of the reticuloendothelial system (RES) (Allen et al., FEBS Letters, 1987, 223, 42; Wu et al., Cancer Research, 1993, 53, 3765).

[0159] Various liposomes comprising one or more glycolipids are known in the art. Papahadjopoulos et al. (Ann. N.Y. Acad. Sci., 1987, 507, 64) reported the ability of monosialoganglioside G_{M1}, galactocerebroside sulfate and phosphatidylinositol to improve blood half-lives of liposomes. These findings were expounded upon by Gabizon et al. (Proc. Natl. Acad. Sci. U.S.A., 1988, 85, 6949). U.S. Pat. No. 4,837,028 and WO 88/04924, both to Allen et al., disclose liposomes comprising (1) sphingomyelin and (2) the ganglioside G_{M1} or a galactocerebroside sulfate ester. U.S. Pat. No. 5,543,152 (Webb et al.) discloses liposomes comprising sphingomyelin. Liposomes comprising 1,2-sn-dimyristoylphosphat-idylcholine are disclosed in WO 97/13499 (Lim et al).

[0160] Many liposomes comprising lipids derivatized with one or more hydrophilic polymers, and methods of preparation thereof, are known in the art. Sunamoto et al. (Bull. Chem. Soc. Jpn., 1980, 53, 2778) described liposomes comprising a nonionic detergent, 2C_{1215G}, that contains a PEG moiety. Illum et al. (FEBS Lett., 1984, 167, 79) noted that hydrophilic coating of polystyrene particles with polymeric glycols results in significantly enhanced blood half-lives. Synthetic phospholipids modified by the attachment of carboxylic groups of polyalkylene glycols (e.g., PEG) are described by Sears (U.S. Pat. Nos. 4,426,330 and 4,534,899). Klibanov et al. (FEBS Lett., 1990, 268, 235) described experiments demonstrating that liposomes comprising phosphatidylethanolamine (PE) derivatized with PEG or PEG stearate have significant increases in blood circulation half-lives. Blume et al. (Biochimica et Biophysica Acta, 1990, 1029, 91) extended such observations to other PEG-derivatized phospholipids, e.g., DSPE-PEG, formed from the combination of distearoylphosphatidylethanolamine (DSPE) and PEG. Liposomes having covalently bound PEG moieties on their external surface are described in European Patent No. EP 0 445 131 B1 and WO 90/04384 to Fisher. Liposome compositions containing 1-20 mole percent of PE derivatized with PEG, and methods of use thereof, are described by Woodle et al. (U.S. Pat. Nos. 5,013,556 and 5,356,633) and Martin et al. (U.S. Pat. No. 5,213,804 and European Patent No. EP 0 496 813 B1). Liposomes comprising a number of other lipid-polymer conjugates are disclosed in WO 91/05545 and U.S. Pat. No. 5,225,212 (both to Martin et al.) and in WO 94/20073 (Zalipsky et al.) Liposomes comprising PEG-modified ceramide lipids are described in WO 96/10391 (Choi et al). U.S. Pat. No. 5,540,935 (Miyazaki et al.) and U.S. Pat. No. 5,556,948 (Tagawa et al.) describe PEG-containing liposomes that can be further derivatized with functional moieties on their surfaces.

[0161] A number of liposomes comprising nucleic acids are known in the art. WO 96/40062 to Thierry et al. discloses methods for encapsulating high molecular weight nucleic acids in liposomes. U.S. Pat. No. 5,264,221 to Tagawa et al. discloses protein-bonded liposomes and asserts that the contents of such liposomes may include a dsRNA. U.S. Pat. No. 5,665,710 to Rahman et al. describes certain methods of encapsulating oligodeoxynucleotides in liposomes. WO 97/04787 to Love et al. discloses liposomes comprising dsRNAs targeted to the raf gene.

[0162] Transfersomes are yet another type of liposomes, and are highly deformable lipid aggregates which are attractive candidates for drug delivery vehicles. Transfersomes may be described as lipid droplets which are so highly deformable that they are easily able to penetrate through pores which are smaller than the droplet. Transfersomes are adaptable to the environment in which they are used, e.g., they are self-optimizing (adaptive to the shape of pores in the skin), self-repairing, frequently reach their targets without fragmenting, and often self-loading. To make transfersomes it is possible to add surface edge-activators, usually surfactants, to a standard liposomal composition. Transfersomes have been used to deliver serum albumin to the skin. The transfersome-mediated delivery of serum albumin has been shown to be as effective as subcutaneous injection of a solution containing serum albumin.

[0163] Surfactants find wide application in formulations such as emulsions (including microemulsions) and liposomes. The most common way of classifying and ranking the properties of the many different types of surfactants, both natural and synthetic, is by the use of the hydrophile/lipophile balance (HLB). The nature of the hydrophilic group (also known as the “head”) provides the most useful means for categorizing the different surfactants used in formulations (Rieger, in Pharmaceutical Dosage Forms, Marcel Dekker, Inc., New York, N.Y., 1988, p. 285).

[0164] If the surfactant molecule is not ionized, it is classified as a nonionic surfactant. Nonionic surfactants find wide application in pharmaceutical and cosmetic products and are usable over a wide range of pH values. In general their HLB values range from 2 to about 18 depending on their structure. Nonionic surfactants include nonionic esters such as ethylene glycol esters, propylene glycol esters, glyceryl esters, polyglyceryl esters, sorbitan esters, sucrose esters, and ethoxylated esters. Nonionic alkanolamides and ethers such as fatty alcohol ethoxylates, propoxylated alcohols, and ethoxylated/propoxylated block polymers are also included in this class. The polyoxyethylene surfactants are the most popular members of the nonionic surfactant class.

[0165] If the surfactant molecule carries a negative charge when it is dissolved or dispersed in water, the surfactant is classified as anionic. Anionic surfactants include carboxylates such as soaps, acyl lactylates, acyl amides of amino acids, esters of sulfuric acid such as alkyl sulfates and ethoxylated alkyl sulfates, sulfonates such as alkyl benzene sulfonates, acyl isethionates, acyl taurates and sulfosuccinates, and phosphates. The most important members of the anionic surfactant class are the alkyl sulfates and the soaps.

[0166] If the surfactant molecule carries a positive charge when it is dissolved or dispersed in water, the surfactant is classified as cationic. Cationic surfactants include quaternary ammonium salts and ethoxylated amines. The quaternary ammonium salts are the most used members of this class.

[0167] If the surfactant molecule has the ability to carry either a positive or negative charge, the surfactant is classified as amphoteric. Amphoteric surfactants include acrylic acid derivatives, substituted alkylamides, N-alkylbetaines and phosphatides.

[0168] The use of surfactants in drug products, formulations and in emulsions has been reviewed (Rieger, in Pharmaceutical Dosage Forms, Marcel Dekker, Inc., New York, N.Y., 1988, p. 285).

[0169] SNALPs

[0170] In one embodiment, a dsRNA featured in the invention is fully encapsulated in the lipid formulation to form a SPLP, pSPLP, SNALP, or other nucleic acid-lipid particle. As used herein, the term “SNALP” refers to a stable nucleic acid-lipid particle, including SPLP. As used herein, the term “SPLP” refers to a nucleic acid-lipid particle comprising plasmid DNA encapsulated within a lipid vesicle. SNALPs and SPLPs typically contain a cationic lipid, a non-cationic lipid, and a lipid that prevents aggregation of the particle (e.g., a PEG-lipid conjugate). SNALPs and SPLPs are extremely useful for systemic applications, as they exhibit extended circulation lifetimes following intravenous (i.v.) injection and accumulate at distal sites (e.g., sites physically separated from the administration site). SPLPs include “pSPLP,” which include an encapsulated condensing agent-nucleic acid complex as set forth in PCT Publication No. WO 00/03683. The particles of the present invention typically have a mean diameter of about 50 nm to about 150 nm, more typically about 60 nm to about 130 nm, more typically about 70 nm to about 110 nm, most typically about 70 to about 90 nm, and are substantially nontoxic. In addition, the nucleic acids when present in the nucleic acid-lipid particles of the present invention are resistant in aqueous solution to degradation with a nuclease. Nucleic acid-lipid particles and their method of preparation are disclosed in, e.g., U.S. Pat. Nos. 5,976,567; 5,981,501; 6,534,484; 6,586,410; 6,815,432; and PCT Publication No. WO 96/40964.

[0171] In one embodiment, the lipid to drug ratio (mass/mass ratio) (e.g., lipid to dsRNA ratio) will be in the range of from about 1:1 to about 50:1, from about 1:1 to about 25:1, from about 3:1 to about 15:1, from about 4:1 to about 10:1, from about 5:1 to about 9:1, or about 6:1 to about 9:1.

[0172] The cationic lipid may be, for example, N,N-dioleyl-N,N-dimethylammonium chloride (DODAC), N,N-distearyl-N,N-dimethylammonium bromide (DDAB), N—(I-(2,3-dioleoyloxy)propyl)-N,N,N-trimethylammonium chloride (DOTAP), N—(I-(2,3-dioleyloxy)propyl)-N,N,N-trimethylammonium chloride (DOTMA), N,N-dimethyl-2,3-dioleyloxy)propylamine (DODMA), 1,2-DiLinoleyloxy-N,N-dimethylaminopropane (DLinDMA), 1,2-Dilinolenyloxy-N,N-dimethylaminopropane (DLenDMA), 1,2-Dilinoleylcarbamoyloxy-3-dimethylaminopropane (DLin-C-DAP), 1,2-Dilinoleyoxy-3-(dimethylamino)acetoxypropane (DLin-DAC), 1,2-Dilinoleyoxy-3-morpholinopropane (DLin-MA), 1,2-Dilinoleoyl-3-dimethylaminopropane (DLinDAP), 1,2-Dilinoleylthio-3-dimethylaminopropane (DLin-S-DMA), 1-Linoleoyl-2-linoleyloxy-3-dimethylaminopropane (DLin-2-DMAP), 1,2-Dilinoleyloxy-3-trimethylaminopropane chloride salt (DLin-TMA.Cl), 1,2-Dilinoleoyl-3-trimethylaminopropane chloride salt (DLin-TAP.Cl), 1,2-Dilinoleyloxy-3-(N-methylpiperazino)propane (DLin-MPZ), or 3-(N,N-Dilinoleylamino)-1,2-propanediol (DLinAP), 3-(N,N-Dioleylamino)-1,2-propanedio (DOAP), 1,2-Dilinoleyloxo-3-(2-N,N-dimethylamino)ethoxypropane (DLin-EG-DMA), 2,2-Dilinoleyl-4-dimethylaminomethyl-[1,3]-dioxolane (DLin-K-DMA) or analogs thereof, or a mixture thereof. The cationic lipid may comprise from about 20 mol % to about 50 mol % or about 40 mol % of the total lipid present in the particle.

[0173] In another embodiment, the compound 2,2-Dilinoleyl-4-dimethylaminoethyl-[1,3]-dioxolane can be used to prepare lipid-siRNA nanoparticles. Synthesis of 2,2-Dilinoleyl-4-dimethylaminoethyl-[1,3]-dioxolane is described in U.S. provisional patent application No. 61/107,998 filed on Oct. 23, 2008, which is herein incorporated by reference.

[0174] In one embodiment, the lipid-siRNA particle includes 40% 2-Dilinoleyl-4-dimethylaminoethyl-[1,3]-dioxolane: 10% DSPC: 40% Cholesterol: 10% PEG-C-DOMG (mole percent) with a particle size of 63.0±20 nm and a 0.027 siRNA/Lipid Ratio.

[0175] The non-cationic lipid may be an anionic lipid or a neutral lipid including, but not limited to, distearoylphosphatidylcholine (DSPC), dioleoylphosphatidylcholine (DOPC), dipalmitoylphosphatidylcholine (DPPC), dioleoylphosphatidylglycerol (DOPG), dipalmitoylphosphatidylglycerol (DPPG), dioleoyl-phosphatidylethanolamine (DOPE), palmitoyloleoylphosphatidylcholine (POPC), palmitoyloleoyl-phosphatidylethanolamine (POPE), dioleoyl-phosphatidylethanolamine 4-(N-maleimidomethyl)-cyclohexane-1-carboxylate (DOPE-mal), dipalmitoyl phosphatidyl ethanolamine (DPPE), dimyristoylphosphoethanolamine (DMPE), distearoyl-phosphatidyl-ethanolamine (DSPE), 16-O-monomethyl PE, 16-O-dimethyl PE, 18-1-trans PE, 1-stearoyl-2-oleoyl-phosphatidyethanolamine (SOPE), cholesterol, or a mixture thereof. The non-cationic lipid may be from about 5 mol % to about 90 mol %, about 10 mol %, or about 58 mol % if cholesterol is included, of the total lipid present in the particle.

[0176] The conjugated lipid that inhibits aggregation of particles may be, for example, a polyethyleneglycol (PEG)-lipid including, without limitation, a PEG-diacylglycerol (DAG), a PEG-dialkyloxypropyl (DAA), a PEG-phospholipid, a PEG-ceramide (Cer), or a mixture thereof. The PEG-DAA conjugate may be, for example, a PEG-dilauryloxypropyl (Ci₂), a PEG-dimyristyloxypropyl (Ci₄), a PEG-dipalmityloxypropyl (Ci₆), or a PEG-distearyloxypropyl (C]₈). The conjugated lipid that prevents aggregation of particles may be from 0 mol % to about 20 mol % or about 2 mol % of the total lipid present in the particle.

[0177] In some embodiments, the nucleic acid-lipid particle further includes cholesterol at, e.g., about 10 mol % to about 60 mol % or about 48 mol % of the total lipid present in the particle.

[0178] LNP

[0179] In one embodiment, the lipidoid ND98.4HCl (MW 1487) (Formula 1), Cholesterol (Sigma-Aldrich), and PEG-Ceramide C16 (Avanti Polar Lipids) can be used to prepare lipid-siRNA nanoparticles (i.e., LNP01 particles). Stock solutions of each in ethanol can be prepared as follows: ND98, 133 mg/ml; Cholesterol, 25 mg/ml, PEG-Ceramide C16, 100 mg/ml. The ND98, Cholesterol, and PEG-Ceramide C16 stock solutions can then be combined in a, e.g., 42:48:10 molar ratio. The combined lipid solution can be mixed with aqueous siRNA (e.g., in sodium acetate pH 5) such that the final ethanol concentration is about 35-45% and the final sodium acetate concentration is about 100-300 mM. Lipid-siRNA nanoparticles typically form spontaneously upon mixing. Depending on the desired particle size distribution, the resultant nanoparticle mixture can be extruded through a polycarbonate membrane (e.g., 100 nm cut-off) using, for example, a thermobarrel extruder, such as Lipex Extruder (Northern Lipids, Inc). In some cases, the extrusion step can be omitted. Ethanol removal and simultaneous buffer exchange can be accomplished by, for example, dialysis or tangential flow filtration. Buffer can be exchanged with, for example, phosphate buffered saline (PBS) at about pH 7, e.g., about pH 6.9, about pH 7.0, about pH 7.1, about pH 7.2, about pH 7.3, or about pH 7.4.

[chemical structure]

[0180] LNP01 formulations are described, e.g., in International Application Publication No. WO 2008/042973, which is hereby incorporated by reference.

[0181] Emulsions

[0182] The compositions of the present invention may be prepared and formulated as emulsions. Emulsions are typically heterogeneous systems of one liquid dispersed in another in the form of droplets usually exceeding 0.1 μm in diameter (Idson, in Pharmaceutical Dosage Forms, Lieberman, Rieger and Banker (Eds.), 1988, Marcel Dekker, Inc., New York, N.Y., volume 1, p. 199; Rosoff, in Pharmaceutical Dosage Forms, Lieberman, Rieger and Banker (Eds.), 1988, Marcel Dekker, Inc., New York, N.Y., Volume 1, p. 245; Block in Pharmaceutical Dosage Forms, Lieberman, Rieger and Banker (Eds.), 1988, Marcel Dekker, Inc., New York, N.Y., volume 2, p. 335; Higuchi et al., in Remington's Pharmaceutical Sciences, Mack Publishing Co., Easton, Pa., 1985, p. 301). Emulsions are often biphasic systems comprising two immiscible liquid phases intimately mixed and dispersed with each other. In general, emulsions may be of either the water-in-oil (w/o) or the oil-in-water (o/w) variety. When an aqueous phase is finely divided into and dispersed as minute droplets into a bulk oily phase, the resulting composition is called a water-in-oil (w/o) emulsion. Alternatively, when an oily phase is finely divided into and dispersed as minute droplets into a bulk aqueous phase, the resulting composition is called an oil-in-water (o/w) emulsion. Emulsions may contain additional components in addition to the dispersed phases, and the active drug which may be present as a solution in either the aqueous phase, oily phase or itself as a separate phase. Pharmaceutical excipients such as emulsifiers, stabilizers, dyes, and anti-oxidants may also be present in emulsions as needed. Pharmaceutical emulsions may also be multiple emulsions that are comprised of more than two phases such as, for example, in the case of oil-in-water-in-oil (o/w/o) and water-in-oil-in-water (w/o/w) emulsions. Such complex formulations often provide certain advantages that simple binary emulsions do not. Multiple emulsions in which individual oil droplets of an o/w emulsion enclose small water droplets constitute a w/o/w emulsion. Likewise a system of oil droplets enclosed in globules of water stabilized in an oily continuous phase provides an o/w/o emulsion.

[0183] Emulsions are characterized by little or no thermodynamic stability. Often, the dispersed or discontinuous phase of the emulsion is well dispersed into the external or continuous phase and maintained in this form through the means of emulsifiers or the viscosity of the formulation. Either of the phases of the emulsion may be a semisolid or a solid, as is the case of emulsion-style ointment bases and creams. Other means of stabilizing emulsions entail the use of emulsifiers that may be incorporated into either phase of the emulsion. Emulsifiers may broadly be classified into four categories: synthetic surfactants, naturally occurring emulsifiers, absorption bases, and finely dispersed solids (Idson, in Pharmaceutical Dosage Forms, Lieberman, Rieger and Banker (Eds.), 1988, Marcel Dekker, Inc., New York, N.Y., volume 1, p. 199).

[0184] Synthetic surfactants, also known as surface active agents, have found wide applicability in the formulation of emulsions and have been reviewed in the literature (Rieger, in Pharmaceutical Dosage Forms, Lieberman, Rieger and Banker (Eds.), 1988, Marcel Dekker, Inc., New York, N.Y., volume 1, p. 285; Idson, in Pharmaceutical Dosage Forms, Lieberman, Rieger and Banker (Eds.), Marcel Dekker, Inc., New York, N.Y., 1988, volume 1, p. 199). Surfactants are typically amphiphilic and comprise a hydrophilic and a hydrophobic portion. The ratio of the hydrophilic to the hydrophobic nature of the surfactant has been termed the hydrophile/lipophile balance (HLB) and is a valuable tool in categorizing and selecting surfactants in the preparation of formulations. Surfactants may be classified into different classes based on the nature of the hydrophilic group: nonionic, anionic, cationic and amphoteric (Rieger, in Pharmaceutical Dosage Forms, Lieberman, Rieger and Banker (Eds.), 1988, Marcel Dekker, Inc., New York, N.Y., volume 1, p. 285).

[0185] Naturally occurring emulsifiers used in emulsion formulations include lanolin, beeswax, phosphatides, lecithin and acacia. Absorption bases possess hydrophilic properties such that they can soak up water to form w/o emulsions yet retain their semisolid consistencies, such as anhydrous lanolin and hydrophilic petrolatum. Finely divided solids have also been used as good emulsifiers especially in combination with surfactants and in viscous preparations. These include polar inorganic solids, such as heavy metal hydroxides, nonswelling clays such as bentonite, attapulgite, hectorite, kaolin, montmorillonite, colloidal aluminum silicate and colloidal magnesium aluminum silicate, pigments and nonpolar solids such as carbon or glyceryl tristearate.

[0186] A large variety of non-emulsifying materials are also included in emulsion formulations and contribute to the properties of emulsions. These include fats, oils, waxes, fatty acids, fatty alcohols, fatty esters, humectants, hydrophilic colloids, preservatives and antioxidants (Block, in Pharmaceutical Dosage Forms, Lieberman, Rieger and Banker (Eds.), 1988, Marcel Dekker, Inc., New York, N.Y., volume 1, p. 335; Idson, in Pharmaceutical Dosage Forms, Lieberman, Rieger and Banker (Eds.), 1988, Marcel Dekker, Inc., New York, N.Y., volume 1, p. 199).

[0187] Hydrophilic colloids or hydrocolloids include naturally occurring gums and synthetic polymers such as polysaccharides (for example, acacia, agar, alginic acid, carrageenan, guar gum, karaya gum, and tragacanth), cellulose derivatives (for example, carboxymethylcellulose and carboxypropylcellulose), and synthetic polymers (for example, carbomers, cellulose ethers, and carboxyvinyl polymers). These disperse or swell in water to form colloidal solutions that stabilize emulsions by forming strong interfacial films around the dispersed-phase droplets and by increasing the viscosity of the external phase.

[0188] Since emulsions often contain a number of ingredients such as carbohydrates, proteins, sterols and phosphatides that may readily support the growth of microbes, these formulations often incorporate preservatives. Commonly used preservatives included in emulsion formulations include methyl paraben, propyl paraben, quaternary ammonium salts, benzalkonium chloride, esters of p-hydroxybenzoic acid, and boric acid. Antioxidants are also commonly added to emulsion formulations to prevent deterioration of the formulation. Antioxidants used may be free radical scavengers such as tocopherols, alkyl gallates, butylated hydroxyanisole, butylated hydroxytoluene, or reducing agents such as ascorbic acid and sodium metabisulfite, and antioxidant synergists such as citric acid, tartaric acid, and lecithin.

[0189] The application of emulsion formulations via dermatological, oral and parenteral routes and methods for their manufacture have been reviewed in the literature (Idson, in Pharmaceutical Dosage Forms, Lieberman, Rieger and Banker (Eds.), 1988, Marcel Dekker, Inc., New York, N.Y., volume 1, p. 199). Emulsion formulations for oral delivery have been very widely used because of ease of formulation, as well as efficacy from an absorption and bioavailability standpoint (Rosoff, in Pharmaceutical Dosage Forms, Lieberman, Rieger and Banker (Eds.), 1988, Marcel Dekker, Inc., New York, N.Y., volume 1, p. 245; Idson, in Pharmaceutical Dosage Forms, Lieberman, Rieger and Banker (Eds.), 1988, Marcel Dekker, Inc., New York, N.Y., volume 1, p. 199). Mineral-oil base laxatives, oil-soluble vitamins and high fat nutritive preparations are among the materials that have commonly been administered orally as o/w emulsions.

[0190] In one embodiment of the present invention, the compositions of dsRNAs and nucleic acids are formulated as microemulsions. A microemulsion may be defined as a system of water, oil and amphiphile which is a single optically isotropic and thermodynamically stable liquid solution (Rosoff, in Pharmaceutical Dosage Forms, Lieberman, Rieger and Banker (Eds.), 1988, Marcel Dekker, Inc., New York, N.Y., volume 1, p. 245). Typically microemulsions are systems that are prepared by first dispersing an oil in an aqueous surfactant solution and then adding a sufficient amount of a fourth component, generally an intermediate chain-length alcohol to form a transparent system. Therefore, microemulsions have also been described as thermodynamically stable, isotropically clear dispersions of two immiscible liquids that are stabilized by interfacial films of surface-active molecules (Leung and Shah, in: Controlled Release of Drugs: Polymers and Aggregate Systems, Rosoff, M., Ed., 1989, VCH Publishers, New York, pages 185-215). Microemulsions commonly are prepared via a combination of three to five components that include oil, water, surfactant, cosurfactant and electrolyte. Whether the microemulsion is of the water-in-oil (w/o) or an oil-in-water (o/w) type is dependent on the properties of the oil and surfactant used and on the structure and geometric packing of the polar heads and hydrocarbon tails of the surfactant molecules (Schott, in Remington's Pharmaceutical Sciences, Mack Publishing Co., Easton, Pa., 1985, p. 271).

[0191] The phenomenological approach utilizing phase diagrams has been extensively studied and has yielded a comprehensive knowledge, to one skilled in the art, of how to formulate microemulsions (Rosoff, in Pharmaceutical Dosage Forms, Lieberman, Rieger and Banker (Eds.), 1988, Marcel Dekker, Inc., New York, N.Y., volume 1, p. 245; Block, in Pharmaceutical Dosage Forms, Lieberman, Rieger and Banker (Eds.), 1988, Marcel Dekker, Inc., New York, N.Y., volume 1, p. 335). Compared to conventional emulsions, microemulsions offer the advantage of solubilizing water-insoluble drugs in a formulation of thermodynamically stable droplets that are formed spontaneously.

[0192] Surfactants used in the preparation of microemulsions include, but are not limited to, ionic surfactants, non-ionic surfactants, Brij 96, polyoxyethylene oleyl ethers, polyglycerol fatty acid esters, tetraglycerol monolaurate (ML310), tetraglycerol monooleate (MO310), hexaglycerol monooleate (PO310), hexaglycerol pentaoleate (PO500), decaglycerol monocaprate (MCA750), decaglycerol monooleate (MO750), decaglycerol sequioleate (SO750), decaglycerol decaoleate (DAO750), alone or in combination with cosurfactants. The cosurfactant, usually a short-chain alcohol such as ethanol, 1-propanol, and 1-butanol, serves to increase the interfacial fluidity by penetrating into the surfactant film and consequently creating a disordered film because of the void space generated among surfactant molecules. Microemulsions may, however, be prepared without the use of cosurfactants and alcohol-free self-emulsifying microemulsion systems are known in the art. The aqueous phase may typically be, but is not limited to, water, an aqueous solution of the drug, glycerol, PEG300, PEG400, polyglycerols, propylene glycols, and derivatives of ethylene glycol. The oil phase may include, but is not limited to, materials such as Captex 300, Captex 355, Capmul MCM, fatty acid esters, medium chain (C8-C12) mono, di, and tri-glycerides, polyoxyethylated glyceryl fatty acid esters, fatty alcohols, polyglycolized glycerides, saturated polyglycolized C8-C10 glycerides, vegetable oils and silicone oil.

[0193] Microemulsions are particularly of interest from the standpoint of drug solubilization and the enhanced absorption of drugs. Lipid based microemulsions (both o/w and w/o) have been proposed to enhance the oral bioavailability of drugs, including peptides (Constantinides et al., Pharmaceutical Research, 1994, 11, 1385-1390; Ritschel, Meth. Find. Exp. Clin. Pharmacol., 1993, 13, 205). Microemulsions afford advantages of improved drug solubilization, protection of drug from enzymatic hydrolysis, possible enhancement of drug absorption due to surfactant-induced alterations in membrane fluidity and permeability, ease of preparation, ease of oral administration over solid dosage forms, improved clinical potency, and decreased toxicity (Constantinides et al., Pharmaceutical Research, 1994, 11, 1385; Ho et al., J. Pharm. Sci., 1996, 85, 138-143). Often microemulsions may form spontaneously when their components are brought together at ambient temperature. This may be particularly advantageous when formulating thermolabile drugs, peptides or dsRNAs. Microemulsions have also been effective in the transdermal delivery of active components in both cosmetic and pharmaceutical applications. It is expected that the microemulsion compositions and formulations of the present invention will facilitate the increased systemic absorption of dsRNAs and nucleic acids from the gastrointestinal tract, as well as improve the local cellular uptake of dsRNAs and nucleic acids.

[0194] Microemulsions of the present invention may also contain additional components and additives such as sorbitan monostearate (Grill 3), Labrasol, and penetration enhancers to improve the properties of the formulation and to enhance the absorption of the dsRNAs and nucleic acids of the present invention. Penetration enhancers used in the microemulsions of the present invention may be classified as belonging to one of five broad categories—surfactants, fatty acids, bile salts, chelating agents, and non-chelating non-surfactants (Lee et al., Critical Reviews in Therapeutic Drug Carrier Systems, 1991, p. 92). Each of these classes has been discussed above.

[0195] Penetration Enhancers

[0196] In one embodiment, the present invention employs various penetration enhancers to effect the efficient delivery of nucleic acids, particularly dsRNAs, to the skin of animals. Most drugs are present in solution in both ionized and nonionized forms. However, usually only lipid soluble or lipophilic drugs readily cross cell membranes. It has been discovered that even non-lipophilic drugs may cross cell membranes if the membrane to be crossed is treated with a penetration enhancer. In addition to aiding the diffusion of non-lipophilic drugs across cell membranes, penetration enhancers also enhance the permeability of lipophilic drugs.

[0197] Penetration enhancers may be classified as belonging to one of five broad categories, i.e., surfactants, fatty acids, bile salts, chelating agents, and non-chelating non-surfactants (Lee et al., Critical Reviews in Therapeutic Drug Carrier Systems, 1991, p. 92). Each of the above mentioned classes of penetration enhancers are described below in greater detail.

[0198] Surfactants: In connection with the present invention, surfactants (or “surface-active agents”) are chemical entities which, when dissolved in an aqueous solution, reduce the surface tension of the solution or the interfacial tension between the aqueous solution and another liquid, with the result that absorption of dsRNAs through the mucosa is enhanced. In addition to bile salts and fatty acids, these penetration enhancers include, for example, sodium lauryl sulfate, polyoxyethylene-9-lauryl ether and polyoxyethylene-20-cetyl ether) (Lee et al., Critical Reviews in Therapeutic Drug Carrier Systems, 1991, p. 92); and perfluorochemical emulsions, such as FC-43. Takahashi et al., J. Pharm. Pharmacol., 1988, 40, 252).

[0199] Fatty acids: Various fatty acids and their derivatives which act as penetration enhancers include, for example, oleic acid, lauric acid, capric acid (n-decanoic acid), myristic acid, palmitic acid, stearic acid, linoleic acid, linolenic acid, dicaprate, tricaprate, monoolein (1-monooleoyl-rac-glycerol), dilaurin, caprylic acid, arachidonic acid, glycerol 1-monocaprate, 1-dodecylazacycloheptan-2-one, acylcarnitines, acylcholines, C₁₋₁₀ alkyl esters thereof (e.g., methyl, isopropyl and t-butyl), and mono- and di-glycerides thereof (i.e., oleate, laurate, caprate, myristate, palmitate, stearate, linoleate, etc.) (Lee et al., Critical Reviews in Therapeutic Drug Carrier Systems, 1991, p. 92; Muranishi, Critical Reviews in Therapeutic Drug Carrier Systems, 1990, 7, 1-33; El Hariri et al., J. Pharm. Pharmacol., 1992, 44, 651-654).

[0200] Bile salts: The physiological role of bile includes the facilitation of dispersion and absorption of lipids and fat-soluble vitamins (Brunton, Chapter 38 in: Goodman & Gilman's The Pharmacological Basis of Therapeutics, 9th Ed., Hardman et al. Eds., McGraw-Hill, New York, 1996, pp. 934-935). Various natural bile salts, and their synthetic derivatives, act as penetration enhancers. Thus the term “bile salts” includes any of the naturally occurring components of bile as well as any of their synthetic derivatives. Suitable bile salts include, for example, cholic acid (or its pharmaceutically acceptable sodium salt, sodium cholate), dehydrocholic acid (sodium dehydrocholate), deoxycholic acid (sodium deoxycholate), glucholic acid (sodium glucholate), glycholic acid (sodium glycocholate), glycodeoxycholic acid (sodium glycodeoxycholate), taurocholic acid (sodium taurocholate), taurodeoxycholic acid (sodium taurodeoxycholate), chenodeoxycholic acid (sodium chenodeoxycholate), ursodeoxycholic acid (UDCA), sodium tauro-24,25-dihydro-fusidate (STDHF), sodium glycodihydrofusidate and polyoxyethylene-9-lauryl ether (POE) (Lee et al., Critical Reviews in Therapeutic Drug Carrier Systems, 1991, page 92; Swinyard, Chapter 39 In: Remington's Pharmaceutical Sciences, 18th Ed., Gennaro, ed., Mack Publishing Co., Easton, Pa., 1990, pages 782-783; Muranishi, Critical Reviews in Therapeutic Drug Carrier Systems, 1990, 7, 1-33; Yamamoto et al., J. Pharm. Exp. Ther., 1992, 263, 25; Yamashita et al., J. Pharm. Sci., 1990, 79, 579-583).

[0201] Chelating Agents: Chelating agents, as used in connection with the present invention, can be defined as compounds that remove metallic ions from solution by forming complexes therewith, with the result that absorption of dsRNAs through the mucosa is enhanced. With regards to their use as penetration enhancers in the present invention, chelating agents have the added advantage of also serving as DNase inhibitors, as most characterized DNA nucleases require a divalent metal ion for catalysis and are thus inhibited by chelating agents (Jarrett, J. Chromatogr., 1993, 618, 315-339). Suitable chelating agents include but are not limited to disodium ethylenediaminetetraacetate (EDTA), citric acid, salicylates (e.g., sodium salicylate, 5-methoxysalicylate and homovanilate), N-acyl derivatives of collagen, laureth-9 and N-amino acyl derivatives of beta-diketones (enamines) (Lee et al., Critical Reviews in Therapeutic Drug Carrier Systems, 1991, page 92; Muranishi, Critical Reviews in Therapeutic Drug Carrier Systems, 1990, 7, 1-33; Buur et al., J. Control Rel., 1990, 14, 43-51).

[0202] Non-chelating non-surfactants: As used herein, non-chelating non-surfactant penetration enhancing compounds can be defined as compounds that demonstrate insignificant activity as chelating agents or as surfactants but that nonetheless enhance absorption of dsRNAs through the alimentary mucosa (Muranishi, Critical Reviews in Therapeutic Drug Carrier Systems, 1990, 7, 1-33). This class of penetration enhancers include, for example, unsaturated cyclic ureas, 1-alkyl- and 1-alkenylazacyclo-alkanone derivatives (Lee et al., Critical Reviews in Therapeutic Drug Carrier Systems, 1991, page 92); and non-steroidal anti-inflammatory agents such as diclofenac sodium, indomethacin and phenylbutazone (Yamashita et al., J. Pharm. Pharmacol., 1987, 39, 621-626).

[0203] Agents that enhance uptake of dsRNAs at the cellular level may also be added to the pharmaceutical and other compositions of the present invention. For example, cationic lipids, such as lipofectin (Junichi et al, U.S. Pat. No. 5,705,188), cationic glycerol derivatives, and polycationic molecules, such as polylysine (Lollo et al., PCT Application WO 97/30731), are also known to enhance the cellular uptake of dsRNAs.

[0204] Other agents may be utilized to enhance the penetration of the administered nucleic acids, including glycols such as ethylene glycol and propylene glycol, pyrrols such as 2-pyrrol, azones, and terpenes such as limonene and menthone.

[0205] Carriers

[0206] dsRNAs of the present invention can be formulated in a pharmaceutically acceptable carrier or diluent. A “pharmaceutically acceptable carrier” (also referred to herein as an “excipient”) is a pharmaceutically acceptable solvent, suspending agent, or any other pharmacologically inert vehicle. Pharmaceutically acceptable carriers can be liquid or solid, and can be selected with the planned manner of administration in mind so as to provide for the desired bulk, consistency, and other pertinent transport and chemical properties. Typical pharmaceutically acceptable carriers include, by way of example and not limitation: water; saline solution; binding agents (e.g., polyvinylpyrrolidone or hydroxypropyl methylcellulose); fillers (e.g., lactose and other sugars, gelatin, or calcium sulfate); lubricants (e.g., starch, polyethylene glycol, or sodium acetate); disintegrates (e.g., starch or sodium starch glycolate); and wetting agents (e.g., sodium lauryl sulfate).

[0207] Certain compositions of the present invention also incorporate carrier compounds in the formulation. As used herein, “carrier compound” or “carrier” can refer to a nucleic acid, or analog thereof, which is inert (i.e., does not possess biological activity per se) but is recognized as a nucleic acid by in vivo processes that reduce the bioavailability of a nucleic acid having biological activity by, for example, degrading the biologically active nucleic acid or promoting its removal from circulation. The co-administration of a nucleic acid and a carrier compound, typically with an excess of the latter substance, can result in a substantial reduction of the amount of nucleic acid recovered in the liver, kidney or other extra-circulatory reservoirs, presumably due to competition between the carrier compound and the nucleic acid for a common receptor. For example, the recovery of a partially phosphorothioate dsRNA in hepatic tissue can be reduced when it is co-administered with polyinosinic acid, dextran sulfate, polycytidic acid or 4-acetamido-4′isothiocyano-stilbene-2,2′-disulfonic acid (Miyao et al., DsRNA Res. Dev., 1995, 5, 115-121; Takakura et al., DsRNA & Nucl. Acid Drug Dev., 1996, 6, 177-183.

[0208] Excipients

[0209] In contrast to a carrier compound, a “pharmaceutical carrier” or “excipient” is a pharmaceutically acceptable solvent, suspending agent or any other pharmacologically inert vehicle for delivering one or more nucleic acids to an animal. The excipient may be liquid or solid and is selected, with the planned manner of administration in mind, so as to provide for the desired bulk, consistency, etc., when combined with a nucleic acid and the other components of a given pharmaceutical composition. Typical pharmaceutical carriers include, but are not limited to, binding agents (e.g., pregelatinized maize starch, polyvinylpyrrolidone or hydroxypropyl methylcellulose, etc.); fillers (e.g., lactose and other sugars, microcrystalline cellulose, pectin, gelatin, calcium sulfate, ethyl cellulose, polyacrylates or calcium hydrogen phosphate, etc.); lubricants (e.g., magnesium stearate, talc, silica, colloidal silicon dioxide, stearic acid, metallic stearates, hydrogenated vegetable oils, corn starch, polyethylene glycols, sodium benzoate, sodium acetate, etc.); disintegrants (e.g., starch, sodium starch glycolate, etc.); and wetting agents (e.g., sodium lauryl sulphate, etc).

[0210] Pharmaceutically acceptable organic or inorganic excipients suitable for non-parenteral administration which do not deleteriously react with nucleic acids can also be used to formulate the compositions of the present invention. Suitable pharmaceutically acceptable carriers include, but are not limited to, water, salt solutions, alcohols, polyethylene glycols, gelatin, lactose, amylose, magnesium stearate, talc, silicic acid, viscous paraffin, hydroxymethylcellulose, polyvinylpyrrolidone and the like.

[0211] Formulations for topical administration of nucleic acids may include sterile and non-sterile aqueous solutions, non-aqueous solutions in common solvents such as alcohols, or solutions of the nucleic acids in liquid or solid oil bases. The solutions may also contain buffers, diluents and other suitable additives. Pharmaceutically acceptable organic or inorganic excipients suitable for non-parenteral administration which do not deleteriously react with nucleic acids can be used.

[0212] Suitable pharmaceutically acceptable excipients include, but are not limited to, water, salt solutions, alcohol, polyethylene glycols, gelatin, lactose, amylose, magnesium stearate, talc, silicic acid, viscous paraffin, hydroxymethylcellulose, polyvinylpyrrolidone and the like.

[0213] Other Components

[0214] The compositions of the present invention may additionally contain other adjunct components conventionally found in pharmaceutical compositions, at their art-established usage levels. Thus, for example, the compositions may contain additional, compatible, pharmaceutically-active materials such as, for example, antipruritics, astringents, local anesthetics or anti-inflammatory agents, or may contain additional materials useful in physically formulating various dosage forms of the compositions of the present invention, such as dyes, flavoring agents, preservatives, antioxidants, opacifiers, thickening agents and stabilizers. However, such materials, when added, should not unduly interfere with the biological activities of the components of the compositions of the present invention. The formulations can be sterilized and, if desired, mixed with auxiliary agents, e.g., lubricants, preservatives, stabilizers, wetting agents, emulsifiers, salts for influencing osmotic pressure, buffers, colorings, flavorings and/or aromatic substances and the like which do not deleteriously interact with the nucleic acid(s) of the formulation.

[0215] Aqueous suspensions may contain substances which increase the viscosity of the suspension including, for example, sodium carboxymethylcellulose, sorbitol and/or dextran. The suspension may also contain stabilizers.

[0216] Methods for Inhibiting Expression of the PCSK9 Gene

[0217] In yet another aspect, the invention provides a method for inhibiting the expression of the PCSK9 gene in a mammal. The method includes administering a composition of the invention to the mammal such that expression of the target PCSK9 gene is decreased for an extended duration, e.g., at least one week, two weeks, three weeks, or four weeks or longer.

[0218] For example, in certain instances, expression of the PCSK9 gene is suppressed by at least about 5%, 10%, 15%, 20%, 25%, 30%, 35%, 40%, 45%, or 50% by administration of a double-stranded oligonucleotide described herein. In some embodiments, the PCSK9 gene is suppressed by at least about 60%, 70%, or 80% by administration of the double-stranded oligonucleotide. In some embodiments, the PCSK9 gene is suppressed by at least about 85%, 90%, or 95% by administration of the double-stranded oligonucleotide. Table 1b, Table 2b, and Table 5b provide a wide range of values for inhibition of expression obtained in an in vitro assay using various PCSK9 dsRNA molecules at various concentrations.

[0219] The effect of the decreased target PCSK9 gene preferably results in a decrease in LDLc (low density lipoprotein cholesterol) levels in the blood, and more particularly in the serum, of the mammal. In some embodiments, LDLc levels are decreased by at least 10%, 15%, 20%, 25%, 30%, 40%, 50%, or 60%, or more, as compared to pretreatment levels.

[0220] The method includes administering a composition containing a dsRNA, where the dsRNA has a nucleotide sequence that is complementary to at least a part of an RNA transcript of the PCSK9 gene of the mammal to be treated. When the organism to be treated is a mammal such as a human, the composition can be administered by any means known in the art including, but not limited to oral or parenteral routes, including intravenous, intramuscular, subcutaneous, transdermal, and airway (aerosol) administration. In some embodiments, the compositions are administered by intravenous infusion or injection.

[0221] The methods and compositions described herein can be used to treat diseases and conditions that can be modulated by down regulating PCSK9 gene expression. For example, the compositions described herein can be used to treat hyperlipidemia and other forms of lipid imbalance such as hypercholesterolemia, hypertriglyceridemia and the pathological conditions associated with these disorders such as heart and circulatory diseases. In some embodiments, a patient treated with a PCSK9 dsRNA is also administered a non-dsRNA therapeutic agent, such as an agent known to treat lipid disorders.

[0222] In one aspect, the invention provides a method of inhibiting the expression of the PCSK9 gene in a subject, e.g., a human. The method includes administering a first single dose of dsRNA, e.g., a dose sufficient to depress levels of PCSK9 mRNA for at least 5, more preferably 7, 10, 14, 21, 25, 30 or 40 days; and optionally, administering a second single dose of dsRNA, wherein the second single dose is administered at least 5, more preferably 7, 10, 14, 21, 25, 30 or 40 days after the first single dose is administered, thereby inhibiting the expression of the PCSK9 gene in a subject.

[0223] In one embodiment, doses of dsRNA are administered not more than once every four weeks, not more than once every three weeks, not more than once every two weeks, or not more than once every week. In another embodiment, the administrations can be maintained for one, two, three, or six months, or one year or longer.

[0224] In another embodiment, administration can be provided when Low Density Lipoprotein cholesterol (LDLc) levels reach or surpass a predetermined minimal level, such as greater than 70 mg/dL, 130 mg/dL, 150 mg/dL, 200 mg/dL, 300 mg/dL, or 400 mg/dL.

[0225] In one embodiment, the subject is selected, at least in part, on the basis of needing (as opposed to merely selecting a patient on the grounds of who happens to be in need of) LDL lowering, LDL lowering without lowering of HDL, ApoB lowering, or total cholesterol lowering without HDL lowering.

[0226] In one embodiment, the dsRNA does not activate the immune system, e.g., it does not increase cytokine levels, such as TNF-alpha or IFN-alpha levels. For example, when measured by an assay, such as an in vitro PBMC assay, such as described herein, the increase in levels of TNF-alpha or IFN-alpha, is less than 30%, 20%, or 10% of control cells treated with a control dsRNA, such as a dsRNA that does not target PCSK9.

[0227] In one aspect, the invention provides a method for treating, preventing or managing a disorder, pathological process or symptom, which, for example, can be mediated by down regulating PCSK9 gene expression in a subject, such as a human subject. In one embodiment, the disorder is hyperlipidemia. The method includes administering a first single dose of dsRNA, e.g., a dose sufficient to depress levels of PCSK9 mRNA for at least 5, more preferably 7, 10, 14, 21, 25, 30 or 40 days; and optionally, administering a second single dose of dsRNA, wherein the second single dose is administered at least 5, more preferably 7, 10, 14, 21, 25, 30 or 40 days after the first single dose is administered, thereby inhibiting the expression of the PCSK9 gene in a subject.

[0228] In another embodiment, a composition containing a dsRNA featured in the invention, i.e., a dsRNA targeting PCSK9, is administered with a non-dsRNA therapeutic agent, such as an agent known to treat a lipid disorders, such as hypercholesterolemia, atherosclerosis or dyslipidemia. For example, a dsRNA featured in the invention can be administered with, e.g., an HMG-CoA reductase inhibitor (e.g., a statin), a fibrate, a bile acid sequestrant, niacin, an antiplatelet agent, an angiotensin converting enzyme inhibitor, an angiotensin II receptor antagonist (e.g., losartan potassium, such as Merck & Co.'s Cozaar®), an acylCoA cholesterol acetyltransferase (ACAT) inhibitor, a cholesterol absorption inhibitor, a cholesterol ester transfer protein (CETP) inhibitor, a microsomal triglyceride transfer protein (MTTP) inhibitor, a cholesterol modulator, a bile acid modulator, a peroxisome proliferation activated receptor (PPAR) agonist, a gene-based therapy, a composite vascular protectant (e.g., AGI-1067, from Atherogenics), a glycoprotein IIb/IIIa inhibitor, aspirin or an aspirin-like compound, an IBAT inhibitor (e.g., S-8921, from Shionogi), a squalene synthase inhibitor, or a monocyte chemoattractant protein (MCP)-I inhibitor. Exemplary HMG-CoA reductase inhibitors include atorvastatin (Pfizer's Lipitor®/Tahor/Sortis/Torvast/Cardyl), pravastatin (Bristol-Myers Squibb's Pravachol, Sankyo's Mevalotin/Sanaprav), simvastatin (Merck's Zocor®/Sinvacor, Boehringer Ingelheim's Denan, Banyu's Lipovas), lovastatin (Merck's Mevacor/Mevinacor, Bexal's Lovastatina, Cepa; Schwarz Pharma's Liposcler), fluvastatin (Novartis' Lescol®/Locol/Lochol, Fujisawa's Cranoc, Solvay's Digaril), cerivastatin (Bayer's Lipobay/GlaxoSmithKline's Baycol), rosuvastatin (AstraZeneca's Crestor®), and pitivastatin (itavastatin/risivastatin) (Nissan Chemical, Kowa Kogyo, Sankyo, and Novartis). Exemplary fibrates include, e.g., bezafibrate (e.g., Roche's Befizal®/Cedur®/Bezalip®, Kissei's Bezatol), clofibrate (e.g., Wyeth's Atromid-S®), fenofibrate (e.g., Fournier's Lipidil/Lipantil, Abbott's Tricor®, Takeda's Lipantil, generics), gemfibrozil (e.g., Pfizer's Lopid/Lipur) and ciprofibrate (Sanofi-Synthelabo's Modalim®). Exemplary bile acid sequestrants include, e.g., cholestyramine (Bristol-Myers Squibb's Questran® and Questran Light™), colestipol (e.g., Pharmacia's Colestid), and colesevelam (Genzyme/Sankyo's WelChol™). Exemplary niacin therapies include, e.g., immediate release formulations, such as Aventis' Nicobid, Upsher-Smith's Niacor, Aventis' Nicolar, and Sanwakagaku's Perycit. Niacin extended release formulations include, e.g., Kos Pharmaceuticals' Niaspan and Upsher-Smith's SIo-Niacin. Exemplary antiplatelet agents include, e.g., aspirin (e.g., Bayer's aspirin), clopidogrel (Sanofi-Synthelabo/Bristol-Myers Squibb's Plavix), and ticlopidine (e.g., Sanofi-Synthelabo's Ticlid and Daiichi's Panaldine). Other aspirin-like compounds useful in combination with a dsRNA targeting PCSK9 include, e.g., Asacard (slow-release aspirin, by Pharmacia) and Pamicogrel (Kanebo/Angelini Ricerche/CEPA). Exemplary angiotensin-converting enzyme inhibitors include, e.g., ramipril (e.g., Aventis' Altace) and enalapril (e.g., Merck & Co.'s Vasotec). Exemplary acyl CoA cholesterol acetyltransferase (ACAT) inhibitors include, e.g., avasimibe (Pfizer), eflucimibe (BioM\acute{ε}rieux Pierre Fabre/Eli Lilly), CS-505 (Sankyo and Kyoto), and SMP-797 (Sumito). Exemplary cholesterol absorption inhibitors include, e.g., ezetimibe (Merck/Schering-Plough Pharmaceuticals Zetia®) and Pamaqueside (Pfizer). Exemplary CETP inhibitors include, e.g., Torcetrapib (also called CP-529414, Pfizer), JTT-705 (Japan Tobacco), and CETi-I (Avant Immunotherapeutics). Exemplary microsomal triglyceride transfer protein (MTTP) inhibitors include, e.g., implitapide (Bayer), R-103757 (Janssen), and CP-346086 (Pfizer). Other exemplary cholesterol modulators include, e.g., NO-1886 (Otsuka/TAP Pharmaceutical), CI-1027 (Pfizer), and WAY-135433 (Wyeth-Ayerst). Exemplary bile acid modulators include, e.g., HBS-107 (Hisamitsu/Banyu), Btg-511 (British Technology Group), BARI-1453 (Aventis), S-8921 (Shionogi), SD-5613 (Pfizer), and AZD-7806 (AstraZeneca). Exemplary peroxisome proliferation activated receptor (PPAR) agonists include, e.g., tesaglitazar (AZ-242) (AstraZeneca), Netoglitazone (MCC-555) (Mitsubishi/Johnson & Johnson), GW-409544 (Ligand Pharmaceuticals/GlaxoSmithKline), GW-501516 (Ligand Pharmaceuticals/GlaxoSmithKline), LY-929 (Ligand Pharmaceuticals and Eli Lilly), LY-465608 (Ligand Pharmaceuticals and Eli Lilly), LY-518674 (Ligand Pharmaceuticals and Eli Lilly), and MK-767 (Merck and Kyorin). Exemplary gene-based therapies include, e.g., AdGWEGF121.10 (GenVec), ApoA1 (UCB Pharma/Groupe Fournier), EG-004 (Trinam) (Ark Therapeutics), and ATP-binding cassette transporter-A1 (ABCAl) (CV Therapeutics/Incyte, Aventis, Xenon). Exemplary Glycoprotein IIb/IIIa inhibitors include, e.g., roxifiban (also called DMP754, Bristol-Myers Squibb), Gantofiban (Merck KGaA/Yamanouchi), and Cromafiban (Millennium Pharmaceuticals). Exemplary squalene synthase inhibitors include, e.g., BMS-1884941 (Bristol-Myers Squibb), CP-210172 (Pfizer), CP-295697 (Pfizer), CP-294838 (Pfizer), and TAK-475 (Takeda). An exemplary MCP-I inhibitor is, e.g., RS-504393 (Roche Bioscience). The anti-atherosclerotic agent BO-653 (Chugai Pharmaceuticals), and the nicotinic acid derivative Nyclin (Yamanouchi Pharmaceuticals) are also appropriate for administering in combination with a dsRNA featured in the invention. Exemplary combination therapies suitable for administration with a dsRNA targeting PCSK9 include, e.g., advicor (Niacin/lovastatin from Kos Pharmaceuticals), amlodipine/atorvastatin (Pfizer), and ezetimibe/simvastatin (e.g., Vytorin® 10/10, 10/20, 10/40, and 10/80 tablets by Merck/Schering-Plough Pharmaceuticals). Agents for treating hypercholesterolemia, and suitable for administration in combination with a dsRNA targeting PCSK9 include, e.g., lovastatin, niacin Altoprev® Extended-Release Tablets (Andrx Labs), lovastatin Caduet® Tablets (Pfizer), amlodipine besylate, atorvastatin calcium Crestor® Tablets (AstraZeneca), rosuvastatin calcium Lescol® Capsules (Novartis), fluvastatin sodium Lescol® (Reliant, Novartis), fluvastatin sodium Lipitor® Tablets (Parke-Davis), atorvastatin calcium Lofibra® Capsules (Gate), Niaspan Extended-Release Tablets (Kos), niacin Pravachol Tablets (Bristol-Myers Squibb), pravastatin sodium TriCor® Tablets (Abbott), fenofibrate Vytorin® 10/10 Tablets (Merck/Schering-Plough Pharmaceuticals), ezetimibe, simvastatin WelChol™ Tablets (Sankyo), colesevelam hydrochloride Zetia® Tablets (Schering), ezetimibe Zetia® Tablets (Merck/Schering-Plough Pharmaceuticals), and ezetimibe Zocor® Tablets (Merck).

[0229] In one embodiment, a dsRNA targeting PCSK9 is administered in combination with an ezetimibe/simvastatin combination (e.g., Vytorin® (Merck/Schering-Plough Pharmaceuticals)).

[0230] In one embodiment, the PCSK9 dsRNA is administered to the patient, and then the non-dsRNA agent is administered to the patient (or vice versa). In another embodiment, the PCSK9 dsRNA and the non-dsRNA therapeutic agent are administered at the same time.

[0231] In another aspect, the invention features, a method of instructing an end user, e.g., a caregiver or a subject, on how to administer a dsRNA described herein. The method includes, optionally, providing the end user with one or more doses of the dsRNA, and instructing the end user to administer the dsRNA on a regimen described herein, thereby instructing the end user.

[0232] In yet another aspect, the invention provides a method of treating a patient by selecting a patient on the basis that the patient is in need of LDL lowering, LDL lowering without lowering of HDL, ApoB lowering, or total cholesterol lowering. The method includes administering to the patient a dsRNA targeting PCSK9 in an amount sufficient to lower the patient's LDL levels or ApoB levels, e.g., without substantially lowering HDL levels.

[0233] In another aspect, the invention provides a method of treating a patient by selecting a patient on the basis that the patient is in need of lowered ApoB levels, and administering to the patient a dsRNA targeting PCSK9 in an amount sufficient to lower the patient's ApoB levels. In one embodiment, the amount of PCSK9 is sufficient to lower LDL levels as well as ApoB levels. In another embodiment, administration of the PCSK9 dsRNA does not affect the level of HDL cholesterol in the patient.

[0234] Unless otherwise defined, all technical and scientific terms used herein have the same meaning as commonly understood by one of ordinary skill in the art to which this invention belongs. Although methods and materials similar or equivalent to those described herein can be used in the practice or testing of the invention, suitable methods and materials are described below. All publications, patent applications, patents, and other references mentioned herein are incorporated by reference in their entirety. In case of conflict, the present specification, including definitions, will control. In addition, the materials, methods, and examples are illustrative only and not intended to be limiting.

### EXAMPLES

### Example 1

### Gene Walking of the PCSK9 Gene

[0235] siRNA design was carried out to identify in two separate selections

[0236] a) siRNAs targeting PCSK9 human and either mouse or rat mRNA and

[0237] b) all human reactive siRNAs with predicted specificity to the target gene PCSK9.

[0238] mRNA sequences to human, mouse and rat PCSK9 were used: Human sequence NM_{—}174936.2 was used as reference sequence during the complete siRNA selection procedure.

[0239] 19 mer stretches conserved in human and mouse, and human and rat PCSK9 mRNA sequences were identified in the first step, resulting in the selection of siRNAs cross-reactive to human and mouse, and siRNAs cross-reactive to human and rat targets

[0240] SiRNAs specifically targeting human PCSK9 were identified in a second selection. All potential 19 mer sequences of human PCSK9 were extracted and defined as candidate target sequences. Sequences cross-reactive to human, monkey, and those cross-reactive to mouse, rat, human and monkey are all listed in Tables 1a and 2a. Chemically modified versions of those sequences and their activity in both in vitro and in vivo assays are also listed in Tables 1a and 2a. The data is described in the examples and in FIGS. 2-8.

[0241] In order to rank candidate target sequences and their corresponding siRNAs and select appropriate ones, their predicted potential for interacting with irrelevant targets (off-target potential) was taken as a ranking parameter. siRNAs with low off-target potential were defined as preferable and assumed to be more specific in vivo.

[0242] For predicting siRNA-specific off-target potential, the following assumptions were made:

[0243] 1) positions 2 to 9 (counting 5′ to 3′) of a strand (seed region) may contribute more to off-target potential than rest of sequence (non-seed and cleavage site region)

[0244] 2) positions 10 and 11 (counting 5′ to 3′) of a strand (cleavage site region) may contribute more to off-target potential than non-seed region

[0245] 3) positions 1 and 19 of each strand are not relevant for off-target interactions

[0246] 4) an off-target score can be calculated for each gene and each strand, based on complementarity of siRNA strand sequence to the gene's sequence and position of mismatches

[0247] 5) number of predicted off-targets as well as highest off-target score must be considered for off-target potential

[0248] 6) off-target scores are to be considered more relevant for off-target potential than numbers of off-targets

[0249] 7) assuming potential abortion of sense strand activity by internal modifications introduced, only off-target potential of antisense strand will be relevant

[0250] To identify potential off-target genes, 19 mer candidate sequences were subjected to a homology search against publicly available human mRNA sequences.

[0251] The following off-target properties for each 19 mer input sequence were extracted for each off-target gene to calculate the off-target score:

[0252] Number of mismatches in non-seed region

[0253] Number of mismatches in seed region

[0254] Number of mismatches in cleavage site region

[0255] The off-target score was calculated for considering assumption 1 to 3 as follows:

Off-target score=number of seed mismatches*10+number of cleavage site mismatches*1.2+number of non-seed mismatches*1

[0256] The most relevant off-target gene for each siRNA corresponding to the input 19 mer sequence was defined as the gene with the lowest off-target score. Accordingly, the lowest off-target score was defined as the relevant off-target score for each siRNA.

### Example 2

### dsRNA Synthesis

[0257] Source of Reagents

[0258] Where the source of a reagent is not specifically given herein, such reagent may be obtained from any supplier of reagents for molecular biology at a quality/purity standard for application in molecular biology.

[0259] siRNA Synthesis

[0260] Single-stranded RNAs were produced by solid phase synthesis on a scale of 1 μmole using an Expedite 8909 synthesizer (Applied Biosystems, Applera Deutschland GmbH, Darmstadt, Germany) and controlled pore glass (CPG, 500 Å, Proligo Biochemie GmbH, Hamburg, Germany) as solid support. RNA and RNA containing 2′-O-methyl nucleotides were generated by solid phase synthesis employing the corresponding phosphoramidites and 2′-O-methyl phosphoramidites, respectively (Proligo Biochemie GmbH, Hamburg, Germany). These building blocks were incorporated at selected sites within the sequence of the oligoribonucleotide chain using standard nucleoside phosphoramidite chemistry such as described in Current protocols in nucleic acid chemistry, Beaucage, S. L. et al. (Edrs.), John Wiley & Sons, Inc., New York, N.Y., USA. Phosphorothioate linkages were introduced by replacement of the iodine oxidizer solution with a solution of the Beaucage reagent (Chruachem Ltd, Glasgow, UK) in acetonitrile (1%). Further ancillary reagents were obtained from Mallinckrodt Baker (Griesheim, Germany).

[0261] Deprotection and purification of the crude oligoribonucleotides by anion exchange HPLC were carried out according to established procedures. Yields and concentrations were determined by UV absorption of a solution of the respective RNA at a wavelength of 260 nm using a spectral photometer (DU 640B, Beckman Coulter GmbH, Unterschleiβheim, Germany). Double stranded RNA was generated by mixing an equimolar solution of complementary strands in annealing buffer (20 mM sodium phosphate, pH 6.8; 100 mM sodium chloride), heated in a water bath at 85-90° C. for 3 minutes and cooled to room temperature over a period of 3-4 hours. The annealed RNA solution was stored at −20° C. until use.

[0262] Conjugated siRNAs

[0263] For the synthesis of 3′-cholesterol-conjugated siRNAs (herein referred to as -Chol-3′), an appropriately modified solid support was used for RNA synthesis. The modified solid support was prepared as follows:

### Diethyl-2-azabutane-1,4-dicarboxylate AA

[chemical structure]

[0265] A 4.7 M aqueous solution of sodium hydroxide (50 ml) was added into a stirred, ice-cooled solution of ethyl glycinate hydrochloride (32.19 g, 0.23 mole) in water (50 ml). Then, ethyl acrylate (23.1 g, 0.23 mole) was added and the mixture was stirred at room temperature until completion of the reaction was ascertained by TLC. After 19 h the solution was partitioned with dichloromethane (3×100 ml). The organic layer was dried with anhydrous sodium sulfate, filtered and evaporated. The residue was distilled to afford AA (28.8 g, 61%).

### 3-{Ethoxycarbonylmethyl-[6-(9H-fluoren-9-ylmethoxycarbonyl-amino)-hexanoyl]-amino}-propionic acid ethyl ester AB

[chemical structure]

[0267] Fmoc-6-amino-hexanoic acid (9.12 g, 25.83 mmol) was dissolved in dichloromethane (50 ml) and cooled with ice. Diisopropylcarbodiimde (3.25 g, 3.99 ml, 25.83 mmol) was added to the solution at 0° C. It was then followed by the addition of Diethyl-azabutane-1,4-dicarboxylate (5 g, 24.6 mmol) and dimethylamino pyridine (0.305 g, 2.5 mmol). The solution was brought to room temperature and stirred further for 6 h. Completion of the reaction was ascertained by TLC. The reaction mixture was concentrated under vacuum and ethyl acetate was added to precipitate diisopropyl urea. The suspension was filtered. The filtrate was washed with 5% aqueous hydrochloric acid, 5% sodium bicarbonate and water. The combined organic layer was dried over sodium sulfate and concentrated to give the crude product which was purified by column chromatography (50% EtOAC/Hexanes) to yield 11.87 g (88%) of AB.

### 3-[(6-Amino-hexanoyl)-ethoxycarbonylmethyl-amino]-propionic acid ethyl ester AC

[chemical structure]

[0269] 3-{Ethoxycarbonylmethyl-[6-(9H-fluoren-9-ylmethoxycarbonylamino)-hexanoyl]-amino}-propionic acid ethyl ester AB (11.5 g, 21.3 mmol) was dissolved in 20% piperidine in dimethylformamide at 0° C. The solution was continued stirring for 1 h. The reaction mixture was concentrated under vacuum, water was added to the residue, and the product was extracted with ethyl acetate. The crude product was purified by conversion into its hydrochloride salt.

### 3-({6-[17-(1,5-Dimethyl-hexyl)-10,13-dimethyl-2,3,4,7,8,9,10,11,12,13,14,15,16,17-tetradecahydro-1H-cyclopenta[a]phenanthren-3-yloxycarbonylamino]-hexanoyl}ethoxycarbonylmethyl-amino)-propionic acid ethyl ester AD

[chemical structure]

[0271] The hydrochloride salt of 3-[(6-Amino-hexanoyl)-ethoxycarbonylmethyl-amino]-propionic acid ethyl ester AC (4.7 g, 14.8 mmol) was taken up in dichloromethane. The suspension was cooled to 0° C. on ice. To the suspension diisopropylethylamine (3.87 g, 5.2 ml, 30 mmol) was added. To the resulting solution cholesteryl chloroformate (6.675 g, 14.8 mmol) was added. The reaction mixture was stirred overnight. The reaction mixture was diluted with dichloromethane and washed with 10% hydrochloric acid. The product was purified by flash chromatography (10.3 g, 92%).

### 1-{6-[17-(1,5-Dimethyl-hexyl)-10,13-dimethyl-2,3,4,7,8,9,10,11,12,13,14,15,16,17-tetradecahydro-1H-cyclopenta[a]phenanthren-3-yloxycarbonylamino]-hexanoyl}-4-oxo-pyrrolidine-3-carboxylic acid ethyl ester AE

[chemical structure]

[0273] Potassium t-butoxide (1.1 g, 9.8 mmol) was slurried in 30 ml of dry toluene. The mixture was cooled to 0° C. on ice and 5 g (6.6 mmol) of diester AD was added slowly with stirring within 20 mins. The temperature was kept below 5° C. during the addition. The stirring was continued for 30 mins at 0° C. and 1 ml of glacial acetic acid was added, immediately followed by 4 g of NaH₂PO₄.H₂O in 40 ml of water The resultant mixture was extracted twice with 100 ml of dichloromethane each and the combined organic extracts were washed twice with 10 ml of phosphate buffer each, dried, and evaporated to dryness. The residue was dissolved in 60 ml of toluene, cooled to 0° C. and extracted with three 50 ml portions of cold pH 9.5 carbonate buffer. The aqueous extracts were adjusted to pH 3 with phosphoric acid, and extracted with five 40 ml portions of chloroform which were combined, dried and evaporated to dryness. The residue was purified by column chromatography using 25% ethylacetate/hexane to afford 1.9 g of b-ketoester (39%).

### [6-(3-Hydroxy-4-hydroxymethyl-pyrrolidin-1-yl)-6-oxo-hexyl]-carbamic acid 17-(1,5-dimethyl-hexyl)-10,13-dimethyl-2,3,4,7,8,9,10,11,12,13,14,15,16,17-tetradecahydro-1H-cyclopenta[a]phenanthren-3-yl ester AF

[chemical structure]

[0275] Methanol (2 ml) was added dropwise over a period of 1 h to a refluxing mixture of b-ketoester AE (1.5 g, 2.2 mmol) and sodium borohydride (0.226 g, 6 mmol) in tetrahydrofuran (10 ml). Stirring was continued at reflux temperature for 1 h. After cooling to room temperature, 1 N HCl (12.5 ml) was added, the mixture was extracted with ethylacetate (3×40 ml). The combined ethylacetate layer was dried over anhydrous sodium sulfate and concentrated under vacuum to yield the product which was purified by column chromatography (10% MeOH/CHCl₃) (89%).

### (6-{3-[Bis-(4-methoxy-phenyl)-phenyl-methoxymethyl]-4-hydroxy-pyrrolidin-1-yl}-6-oxo-hexyl)-carbamic acid 17-(1,5-dimethyl-hexyl)-10,13-dimethyl-2,3,4,7,8,9,10,11,12,13,14,15,16,17-tetradecahydro-1H-cyclopenta[a]phenanthren-3-yl ester AG

[chemical structure]

[0277] Diol AF (1.25 gm 1.994 mmol) was dried by evaporating with pyridine (2×5 ml) in vacuo. Anhydrous pyridine (10 ml) and 4,4′-dimethoxytritylchloride (0.724 g, 2.13 mmol) were added with stirring. The reaction was carried out at room temperature overnight. The reaction was quenched by the addition of methanol. The reaction mixture was concentrated under vacuum and to the residue dichloromethane (50 ml) was added. The organic layer was washed with 1M aqueous sodium bicarbonate. The organic layer was dried over anhydrous sodium sulfate, filtered and concentrated. The residual pyridine was removed by evaporating with toluene. The crude product was purified by column chromatography (2% MeOH/Chloroform, Rf=0.5 in 5% MeOH/CHCl₃) (1.75 g, 95%).

### Succinic acid mono-(4-[bis-(4-methoxy-phenyl)-phenyl-methoxymethyl]-1-{6-[17-(1,5-dimethyl-hexyl)-10,13-dimethyl 2,3,4,7,8,9,10,11,12,13,14,15,16,17-tetradecahydro-1H cyclopenta[a]phenanthren-3-yloxycarbonylamino]-hexanoyl}-pyrrolidin-3-yl)ester AH

[chemical structure]

[0279] Compound AG (1.0 g, 1.05 mmol) was mixed with succinic anhydride (0.150 g, 1.5 mmol) and DMAP (0.073 g, 0.6 mmol) and dried in a vacuum at 40° C. overnight. The mixture was dissolved in anhydrous dichloroethane (3 ml), triethylamine (0.318 g, 0.440 ml, 3.15 mmol) was added and the solution was stirred at room temperature under argon atmosphere for 16 h. It was then diluted with dichloromethane (40 ml) and washed with ice cold aqueous citric acid (5 wt %, 30 ml) and water (2×20 ml). The organic phase was dried over anhydrous sodium sulfate and concentrated to dryness. The residue was used as such for the next step.

[0280] Cholesterol Derivatised CPG AI

[chemical structure]

[0281] Succinate AH (0.254 g, 0.242 mmol) was dissolved in a mixture of dichloromethane/acetonitrile (3:2, 3 ml). To that solution DMAP (0.0296 g, 0.242 mmol) in acetonitrile (1.25 ml), 2,2′-Dithio-bis(5-nitropyridine) (0.075 g, 0.242 mmol) in acetonitrile/dichloroethane (3:1, 1.25 ml) were added successively. To the resulting solution triphenylphosphine (0.064 g, 0.242 mmol) in acetonitrile (0.6 ml) was added. The reaction mixture turned bright orange in color. The solution was agitated briefly using a wrist-action shaker (5 mins). Long chain alkyl amine-CPG (LCAA-CPG) (1.5 g, 61 mM) was added. The suspension was agitated for 2 h. The CPG was filtered through a sintered funnel and washed with acetonitrile, dichloromethane and ether successively. Unreacted amino groups were masked using acetic anhydride/pyridine. The achieved loading of the CPG was measured by taking UV measurement (37 mM/g).

[0282] The synthesis of siRNAs bearing a 5′-12-dodecanoic acid bisdecylamide group (herein referred to as “5′-C32-”) or a 5′-cholesteryl derivative group (herein referred to as “5′-Chol-”) was performed as described in WO 2004/065601, except that, for the cholesteryl derivative, the oxidation step was performed using the Beaucage reagent in order to introduce a phosphorothioate linkage at the 5′-end of the nucleic acid oligomer.

[0283] Synthesis of dsRNAs conjugated to Chol-p-(GalNAc)₃ (N-acetyl galactosamine-cholesterol) (FIG. 16) and LCO(GalNAc)₃ (N-acetyl galactosamine-3′-Lithocholic-oleoyl) (FIG. 17) is described in U.S. patent application Ser. No. 12/328,528, filed on Dec. 4, 2008, which is hereby incorporated by reference.

### Example 3

### PCSK9 siRNA Screening in HuH7, HepG2, HeLa and Primary Monkey Hepatocytes Discovers Highly Active Sequences

[0284] HuH-7 cells were obtained from JCRB Cell Bank (Japanese Collection of Research Bioresources) (Shinjuku, Japan, cat. No.: JCRB0403) Cells were cultured in Dulbecco's MEM (Biochrom AG, Berlin, Germany, cat. No. F0435) supplemented to contain 10% fetal calf serum (FCS) (Biochrom AG, Berlin, Germany, cat. No. S0115), Penicillin 100 U/ml, Streptomycin 100 μg/ml (Biochrom AG, Berlin, Germany, cat. No. A2213) and 2 mM L-Glutamin (Biochrom AG, Berlin, Germany, cat. No K0282) at 37° C. in an atmosphere with 5% CO₂ in a humidified incubator (Heraeus HERAcell, Kendro Laboratory Products, Langenselbold, Germany). HepG2 and HeLa cells were obtained from American Type Culture Collection (Rockville, Md., cat. No. HB-8065) and cultured in MEM (Gibco Invitrogen, Karlsruhe, Germany, cat. No. 21090-022) supplemented to contain 10% fetal calf serum (FCS) (Biochrom AG, Berlin, Germany, cat. No. S0115), Penicillin 100 U/ml, Streptomycin 100 μg/ml (Biochrom AG, Berlin, Germany, cat. No. A2213), 1× Non Essential Amino Acids (Biochrom AG, Berlin, Germany, cat. No. K-0293), and 1 mM Sodium Pyruvate (Biochrom AG, Berlin, Germany, cat. No. L-0473) at 37° C. in an atmosphere with 5% CO₂ in a humidified incubator (Heraeus HERAcell, Kendro Laboratory Products, Langenselbold, Germany).

[0285] For transfection with siRNA, HuH7, HepG2, or HeLa cells were seeded at a density of 2.0×10⁴ cells/well in 96-well plates and transfected directly. Transfection of siRNA (30 nM for single dose screen) was carried out with lipofectamine 2000 (Invitrogen GmbH, Karlsruhe, Germany, cat. No. 11668-019) as described by the manufacturer.

[0286] 24 hours after transfection HuH7 and HepG2 cells were lysed and PCSK9 mRNA levels were quantified with the Quantigene Explore Kit (Genosprectra, Dumbarton Circle Fremont, USA, cat. No. QG-000-02) according to the protocol. PCSK9 mRNA levels were normalized to GAP-DH mRNA. For each siRNA eight individual datapoints were collected. siRNA duplexes unrelated to PCSK9 gene were used as control. The activity of a given PCSK9 specific siRNA duplex was expressed as percent PCSK9 mRNA concentration in treated cells relative to PCSK9 mRNA concentration in cells treated with the control siRNA duplex.

[0287] Primary cynomolgus monkey hepatocytes (cryopreserved) were obtained from In vitro Technologies, Inc. (Baltimore, Md., USA, cat No M00305) and cultured in InVitroGRO CP Medium (cat No Z99029) at 37° C. in an atmosphere with 5% CO₂ in a humidified incubator.

[0288] For transfection with siRNA, primary cynomolgus monkey cells were seeded on Collagen coated plates (Fisher Scientific, cat. No. 08-774-5) at a density of 3.5×10⁴ cells/well in 96-well plates and transfected directly. Transfection of siRNA (eight 2-fold dilution series starting from 30 nM) in duplicates was carried out with lipofectamine 2000 (Invitrogen GmbH, Karlsruhe, Germany, cat. No. 11668-019) as described by the manufacturer.

[0289] 16 hours after transfection medium was changed to fresh InVitroGRO CP Medium with Torpedo Antibiotic Mix (In vitro Technologies, Inc, cat. No Z99000) added.

[0290] 24 hours after medium change primary cynomolgus monkey cells were lysed and PCSK9 mRNA levels were quantified with the Quantigene Explore Kit (Genosprectra, Dumbarton Circle Fremont, USA, cat. No. QG-000-02) according to the protocol. PCSK9 mRNA levels were normalized to GAPDH mRNA. Normalized PCSK9/GAPDH ratios were then compared to PCSK9/GAPDH ratio of lipofectamine 2000 only control.

[0291] Tables 1b and 2b (and FIG. 6A) summarize the results and provide examples of in vitro screens in different cell lines at different doses. Silencing of PCSK9 transcript was expressed as percentage of remaining transcript at a given dose.

[0292] Highly active sequences are those with less than 70% transcript remaining post treatment with a given siRNA at a dose less than or equal to 100 nM. Very active sequences are those that have less than 60% of transcript remaining after treatment with a dose less than or equal to 100 nM. Active sequences are those that have less than 90% transcript remaining after treatment with a high dose (100 nM).

[0293] Examples of active siRNA's were also screened in vivo in mouse in lipidoid formulations as described below. Active sequences in vitro were also generally active in vivo (See FIGS. 6A and 6B and example 4).

### Example 4

### In Vivo Efficacy Screen of PCSK9 siRNAs

[0294] 32 PCSK9 siRNAs formulated in LNP-01 liposomes were tested in vivo in a mouse model. LNP01 is a lipidoid formulation formed from cholesterol, mPEG2000-C14 Glyceride, and dsRNA. The LNP01 formulation is useful for delivering dsRNAs to the liver.

[0295] Formulation Procedure

[0296] The lipidoid LNP-01.4HCl (MW 1487) (FIG. 1), Cholesterol (Sigma-Aldrich), and PEG-Ceramide C16 (Avanti Polar Lipids) were used to prepare lipid-siRNA nanoparticles. Stock solutions of each in ethanol were prepared: LNP-01, 133 mg/ml; Cholesterol, 25 mg/ml, PEG-Ceramide C16, 100 mg/ml. LNP-01, Cholesterol, and PEG-Ceramide C16 stock solutions were then combined in a 42:48:10 molar ratio. Combined lipid solution was mixed rapidly with aqueous siRNA (in sodium acetate pH 5) such that the final ethanol concentration was 35-45% and the final sodium acetate concentration was 100-300 mM. Lipid-siRNA nanoparticles formed spontaneously upon mixing. Depending on the desired particle size distribution, the resultant nanoparticle mixture was in some cases extruded through a polycarbonate membrane (100 nm cut-off) using a thermobarrel extruder (Lipex Extruder, Northern Lipids, Inc). In other cases, the extrusion step was omitted. Ethanol removal and simultaneous buffer exchange was accomplished by either dialysis or tangential flow filtration. Buffer was exchanged to phosphate buffered saline (PBS) pH 7.2.

[0297] Characterization of Formulations

[0298] Formulations prepared by either the standard or extrusion-free method are characterized in a similar manner. Formulations are first characterized by visual inspection. They should be whitish translucent solutions free from aggregates or sediment. Particle size and particle size distribution of lipid-nanoparticles are measured by dynamic light scattering using a Malvern Zetasizer Nano ZS (Malvern, USA). Particles should be 20-300 nm, and ideally, 40-100 nm in size. The particle size distribution should be unimodal. The total siRNA concentration in the formulation, as well as the entrapped fraction, is estimated using a dye exclusion assay. A sample of the formulated siRNA is incubated with the RNA-binding dye Ribogreen (Molecular Probes) in the presence or absence of a formulation disrupting surfactant, 0.5% Triton-X100. The total siRNA in the formulation is determined by the signal from the sample containing the surfactant, relative to a standard curve. The entrapped fraction is determined by subtracting the “free” siRNA content (as measured by the signal in the absence of surfactant) from the total siRNA content. Percent entrapped siRNA is typically >85%.

[0299] Bolus Dosing

[0300] Bolus dosing of formulated siRNAs in C57/BL6 mice (5/group, 8-10 weeks old, Charles River Laboratories, MA) was performed by tail vein injection using a 27 G needle. SiRNAs were formulated in LNP-01 (and then dialyzed against PBS) at 0.5 mg/ml concentration allowing the delivery of the 5 mg/kg dose in 10 μl/g body weight. Mice were kept under an infrared lamp for approximately 3 min prior to dosing to ease injection.

[0301] 48 hour post dosing mice were sacrificed by CO₂-asphyxiation. 0.2 ml blood was collected by retro-orbital bleeding and the liver was harvested and frozen in liquid nitrogen. Serum and livers were stored at −80° C. μl

[0302] Frozen livers were grinded using 6850 Freezer/Mill Cryogenic Grinder (SPEX CentriPrep, Inc) and powders stored at −80° C. until analysis.

[0303] PCSK9 mRNA levels were detected using the branched-DNA technology based kit from QuantiGene Reagent System (Genospectra) according to the protocol. 10-20 mg of frozen liver powders was lysed in 600 μl of 0.16 μg/ml Proteinase K (Epicentre, #MPRK092) in Tissue and Cell Lysis Solution (Epicentre, #MTC096H) at 65° C. for 3 hours. Then 10 μl of the lysates were added to 90 μl of Lysis Working Reagent (1 volume of stock Lysis Mixture in two volumes of water) and incubated at 52° C. overnight on Genospectra capture plates with probe sets specific to mouse PCSK9 and mouse GAPDH or cyclophilin B. Nucleic acid sequences for Capture Extender (CE), Label Extender (LE) and blocking (BL) probes were selected from the nucleic acid sequences of PCSK9, GAPDH and cyclophilin B with the help of the QuantiGene ProbeDesigner Software 2.0 (Genospectra, Fremont, Calif., USA, cat. No. QG-002-02). Chemo luminescence was read on a Victor2-Light (Perkin Elmer) as Relative light units. The ratio of PCSK9 mRNA to GAPDH or cyclophilin B mRNA in liver lysates was averaged over each treatment group and compared to a control group treated with PBS or a control group treated with an unrelated siRNA (blood coagulation factor VII).

[0304] Total serum cholesterol in mouse serum was measured using the StanBio Cholesterol LiquiColor kit (StanBio Laboratory, Boerne, Texas, USA) according to manufacturer's instructions. Measurements were taken on a Victor2 1420 Multilabel Counter (Perkin Elmer) at 495 nm.

[0305] Results

[0306] At least 10 PCSK9 siRNAs showed more than 40% PCSK9 mRNA knock down compared to a control group treated with PBS, while control group treated with an unrelated siRNA (blood coagulation factor VII) had no effect (FIGS. 2-3). Silencing of PCSK9 transcript also correlated with a lowering of total serum cholesterol in these animals (FIGS. 4-5). The most efficacious siRNAs with respect to knocking down PCSK9 mRNAs also showed the most pronounced cholesterol lowering effects (compare FIGS. 2-3 and FIGS. 4-5). In addition there was a strong correlation between those molecules that were active in vitro and those active in vivo (compare FIGS. 6A and 6B).

[0307] Sequences containing different chemical modifications were also screened in vitro (Tables 1 and 2) and in vivo. As an example, less modified sequences AD-9314 and AD-9318, and a more modified versions of that sequence AD-9314 (AD-10792, AD-10793, and AD-10796); AD-9318-(AD-10794, AD-10795, AD-10797) were tested both in vitro (in primary monkey hepatocytes) or in vivo (AD-9314 and AD-10792) formulated in LNP-01. FIG. 7 (also see Tables 1 and 2) shows that the parent molecules AD-9314 and AD-9318 and the modified versions were all active in vitro. FIG. 8 as an example shows that both the parent AD-9314 and the more highly modified AD-10792 sequences were active in vivo displaying 50-60% silencing of endogenous PCSK9 in mice. FIG. 9 further exemplifies that activity of other chemically modified versions of AD-9314 and AD-0792.

[0308] AD-3511, a derivative of AD-10792, was as efficacious as 10792 (IC50 of ˜0.07-0.2 nM) (data not shown). The sequences of the sense and antisense strands of AD-3511 are as follows:

SEQ ID NO: 1521

Sense strand: 5′-GccuGGAGuuuAuucGGAAdTsdT

SEQ ID NO: 1522

Antisense strand: 5′-puUCCGAAuAAACUCcAGGCdTsdT

### Example 5

### PCSK9 Duration of Action Experiments

[0309] Rats

[0310] Rats were treated via tail vein injection with 5 mg/kg of LNP01-10792 (Formulated ALDP-10792). Blood was drawn at the indicated time points (see Table 3) and the amount of total cholesterol compared to PBS treated animals was measured by standard means. Total cholesterol levels decreased at day two 60% and returned to baseline by day 28. These data show that formulated versions of PCSK9 siRNAs lower cholesterol levels for extended periods of time.

[0311] Monkeys

[0312] Cynomolgus monkeys were treated with LNP01 formulated dsRNA and LDL-C levels were evaluated. A total of 19 cynomolgus monkeys were assigned to dose groups. Beginning on Day −11, animals were limit-fed twice-a-day according to the following schedule: feeding at 9 a.m., feed removal at 10 a.m., feeding at 4 p.m., feed removal at 5

[0313] p.m. On the first day of dosing all animals were dosed once via 30-minute intravenous infusion. The animals were evaluated for changes in clinical signs, body weight, and clinical pathology indices, including direct LDL and HDL cholesterol.

[0314] Venipuncture through the femoral vein was used to collect blood samples. Samples were collected prior to the morning feeding (i.e., before 9 a.m.) and at approximately 4 hours (beginning at 1 p.m.) after the morning feeding on Days −3, −1,3,4,5, and 7 for Groups 1-7; on Day 14 for Groups 1, 4, and 6; on Days 18 and 21 for Group 1; and on Day 21 for Groups 4 and 6. At least two 1.0 ml samples were collected at each time point.

[0315] No anticoagulant was added to the 1.0 ml serum samples, and the dry anticoagulant Ethylenediaminetetraacetic acid (K2) was added to each 1.0 ml plasma sample. Serum samples were allowed to stand at room temperature for at least 20 minutes to facilitate coagulation and then the samples were placed on ice. Plasma samples were placed on ice as soon as possible following sample collection. Samples were transported to the clinical pathology lab within 30 minutes for further processing.

[0316] Blood samples were processed to serum or plasma as soon as possible using a refrigerated centrifuge, per Testing Facility Standard operating procedure. Each sample was split into 3 approximately equal volumes, quickly frozen in liquid nitrogen, and placed at −70° C. Each aliquot should have had a minimum of approximately 50 μL. If the total sample volume collected was under 150 μL, the residual sample volume went into the last tube. Each sample was labeled with the animal number, dose group, day of collection, date, nominal collection time, and study number(s). Serum LDL cholesterol was measured directly per standard procedures on a Beckman analyzer according to manufactures instructions.

[0317] The results are shown in Table 4. LNP01-10792 and LNP01-9680 administered at 5 mg/kg decreased serum LDL cholesterol within 3 to 7 days following dose administration. Serum LDL cholesterol returned to baseline levels by Day 14 in most animals receiving LNP01-10792 and by Day 21 in animals receiving LNP01-9680. This data demonstrated a greater than 21 day duration of action for cholesterol lowering of LNP01 formulated ALDP-9680.

### Example 6

### PCSK9 siRNAs Cause Decreased PCSK mRNA in Liver Extracts, and Lower Serum Cholesterol Levels

[0318] To test if acute silencing of the PCSK9 transcript by a PCSK9 siRNA (and subsequent PCSK9 protein down-regulation), would result in acutely lower total cholesterol levels, siRNA molecule AD-1a2 (AD-10792) was formulated in an LNP01 lipidoid formulation. Sequences and modifications of these dsRNAs are shown in Table 5a. Liposomal formulated siRNA duplex AD-1a2 (LNP01-1a2) was injected via tail vein in low volumes (˜0.2 ml for mouse and ˜1.0 ml for rats) at different doses into C57/BL6 mice or Sprague Dawley rats.

[0319] In mice, livers were harvested 48 hours post-injection, and levels of PCSK9 transcript were determined. In addition to liver, blood was harvested and subjected to a total cholesterol analysis. LNP01-1a2 displayed a clear dose response with maximal PCSK9 message suppression (˜60-70%) as compared to a control siRNA targeting luciferase (LNP01-ctrl) or PBS treated animals (FIG. 14A). The decrease of PCSK9 transcript at the highest dose translated into a ˜30% lowering of total cholesterol in mice (FIG. 14B). This level of cholesterol reduction is between that reported for heterozygous and homozygous PCSK9 knock-out mice (Rashid et al., Proc. Natl. Acad. Sci. USA 102:5374-9, 2005, epub Apr. 1, 2005). Thus, lowering of PCSK9 transcript through an RNAi mechanism is capable of acutely decreasing total cholesterol in mice. Moreover the effect on the PCSK9 transcript persisted between 20-30 days, with higher doses displaying greater initial transcript level reduction, and subsequently more persistent effects.

[0320] Down-modulation of total cholesterol in rats has been historically difficult as cholesterol levels remain unchanged even at high doses of HMG-CoA reductase inhibitors. Interestingly, as compared to mice, rats appear to have a much higher level of PCSK9 basal transcript levels as measured by bDNA assays. Rats were dosed with a single injection of LNP01-a2 via tail vein at 1, 2.5 and 5 mg/kg. Liver tissue and blood were harvested 72 hours post-injection. LNP01-1a2 exhibited a clear dose response effect with maximal 50-60% silencing of the PCSK9 transcript at the highest dose, as compared to a control luciferase siRNA and PBS (FIG. 10A). The mRNA silencing was associate with an acute ˜50-60% decrease of serum total cholesterol (FIGS. 10A and 10B) lasting 10 days, with a gradual return to pre-dose levels by ˜3 weeks (FIG. 10B). This result demonstrated that lowering of PCSK9 via siRNA targeting had acute, potent and lasting effects on total cholesterol in the rat model system. To confirm that the transcript reduction observed was due to a siRNA mechanism, liver extracts from treated or control animals were subjected to 5′ RACE, a method previously utilized to demonstrate that the predicted siRNA cleavage event occurs (Zimmermann et al., Nature. 441:111-4, 2006, Epub 2006 Mar. 26). PCR amplification and detection of the predicted site specific mRNA cleavage event was observed in animals treated with LNP01-1a2, but not PBS or LNP01-ctrl control animals. (Frank-Kamanetsky et al. (2008) PNAS 105:119715-11920) This result demonstrated that the effects of LNP01-1a2 observed were due to cleavage of the PCSK9 transcript via an siRNA specific mechanism.

[0321] The mechanism by which PCSK9 impacts cholesterol levels has been linked to the number of LDLRs on the cell surface. Rats (as opposed to mice, NHP, and humans) control their cholesterol levels through tight regulation of cholesterol synthesis and to a lesser degree through the control of LDLR levels. To investigate whether modulation of LDLR was occurring upon RNAi therapeutic targeting of PCSK9, we quantified the liver LDLR levels (via western blotting) in rats treated with 5 mg/kg LNP01-1a2. As shown in FIG. 11, LNP01-1a2 treated animals had a significant (˜3-5 fold average) induction of LDLR levels 48 hours post a single dose of LNP01-1a2 compared to PBS or LNP01-ctrl control siRNA treated animals.

[0322] Assays were also performed to test whether reduction of PCSK9 changes the levels of triglycerides and cholesterol in the liver itself. Acute lowering of genes involved in VLDL assembly and secretion such as microsomal triglyceride transfer protein (MTP) or ApoB by genetic deletion, compounds, or siRNA inhibitors results in increased liver triglycerides (see, e.g., Akdim et al., Curr. Opin. Lipidol. 18:397-400, 2007). Increased clearance of plasma cholesterol induced by PCSK9 silencing in the liver (and a subsequent increase in liver LDLR levels) was not predicted to result in accumulation of liver triglycerides. However, to address this possibility, liver cholesterol and triglyceride concentrations in livers of the treated or control animals were quantified. As shown in FIG. 10C, there was no statistical difference in liver TG levels or cholesterol levels of rats administered PCSK9 siRNAs compared to the controls. These results indicated that PCSK9 silencing and subsequent cholesterol lowering is unlikely to result in excess hepatic lipid accumulation.

### Example 7

### Additional Modifications to siRNAs do not Affect Silencing and Duration of Cholesterol Reduction in Rats

[0323] Phosphorothioate modifications at the 3′ ends of both sense and antisense strands of a dsRNA can protect against exonucleases. 2′OMe and 2° F. modifications in both the sense and antisense strands of a dsRNA can protect against endonucleases. AD-1a2 (see Table 5b) contains 2′OMe modifications on both the sense and antisense strands. Experiments were performed to determine if the inherent stability (as measured by siRNA stability in human serum) or the degree or type of chemical modification (2′OMe versus 2° F. or a mixture) was related to either the observed rat efficacy or the duration of silencing effects. Stability of siRNAs with the same AD-1a2 core sequence, but containing different chemical modifications were created and tested for activity in vitro in primary Cyno monkey hepatocytes. A series of these molecules that maintained similar activity as measured by in vitro IC50 values for PCSK9 silencing (Table 5b), were then tested for their stability against exo and endonuclease cleavage in human serum. Each duplex was incubated in human serum at 37° C. (a time course), and subjected to HPLC analysis. The parent sequence AD-1a2 had a T½ of ˜7 hours in pooled human serum. Sequences AD-1a3, AD-1a5, and AD-1a4, which were more heavily modified (see chemical modifications in Table 5) all had T ½'s greater than 24 hours. To test whether the differences in chemical modification or stability resulted in changes in efficacy, AD-1a2, AD-1a3, AD-1a5, AD-1a4, and an AD-control sequence were formulated and injected into rats. Blood was collected from animals at various days post-dose, and total cholesterol concentrations were measured. Previous experiments had shown a very tight correlation between the lowering of PCSK9 transcript levels and total cholesterol values in rats treated with LNP01-1a2 (FIG. 10A). All four molecules were observed to decrease total cholesterol by ˜60% day 2 post-dose (versus PBS or control siRNA), and all of the molecules had equal effects on total cholesterol levels displaying similar magnitude and duration profiles. There was no statistical difference in the magnitude of cholesterol lowering and the duration of effect demonstrated by these molecules, regardless of their different chemistries or stabilities in human serum.

### Example 8

### LNP01-1a2 and LNP01-3a1 Silence Human PCSK9 and Circulating Human PCSK9 Protein in Transgenic Mice

[0324] The efficacy of LNP01-1a2 (i.e., PCS-A2 or AD-10792) and another molecule, AD-3a1 (i.e., PCS-C2 or AD-9736) (which targets only human and monkey PCSK9 message), to silence the human PCSK9 gene was tested in vivo. A line of transgenic mice expressing human PCSK9 under the ApoE promoter was used (Lagace et al., J Clin Invest. 116:2995-3005, 2006). Specific PCR reagents and antibodies were designed that detected the human but not the mouse transcripts and protein respectively. Cohorts of the humanized mice were injected with a single dose of LNP01-1a2 (a.k.a. LNP-PCS-A2) or LNP01-3a1 (a.k.a. LNP-PCS-C2), and 48 hours later both livers and blood were collected. A single dose of LNP01-1a2 or LNP01-3a1 was able to decrease the human PCSK9 transcript levels by >70% (FIG. 15A), and this transcript down-regulation resulted in significantly lower levels of circulating human PCSK9 protein as measured by ELISA (FIG. 15B). These results demonstrated that both siRNAs were capable of silencing the human transcript and subsequently reducing the amount of circulating plasma human PCSK9 protein.

### Example 9

### Secreted PCSK9 Levels are Regulated by Diet in NHP

[0325] In mice, PCSK9 mRNA levels are regulated by the transcription factor sterol regulatory element binding protein-2 and are reduced by fasting. In clinical practice, and standard NHP studies, blood collection and cholesterol levels are measured after an over-night fasting period. This is due in part to the potential for changes in circulating TGs to interfere with the calculation of LDLc values. Given the regulation of PCSK9 levels by fasting and feeding behavior in mice, experiments were performed to understand the effect of fasting and feeding in NHP.

[0326] Cyno monkeys were acclimated to a twice daily feeding schedule during which food was removed after a one hour period. Animals were fed from 9-10 am in the morning, after which food was removed. The animals were next fed once again for an hour between 5 pm-6 pm with subsequent food removal. Blood was drawn after an overnight fast (6 pm until 9 am the next morning), and again, 2 and 4 hours following the 9 am feeding. PCSK9 levels in blood plasma or serum were determined by ELISA assay (see Methods). Interestingly, circulating PCSK9 levels were found to be higher after the overnight fasting and decreased 2 and 4 hours after feeding. This data was consistent with rodent models where PCSK9 levels were highly regulated by food intake. However, unexpectedly, the levels of PCSK9 went down the first few hours post-feeding. This result enabled a more carefully designed NHP experiment to probe the efficacy of formulated AD-1a2 and another PCSK9 siRNA (AD-2a1) that was highly active in primary Cyno hepatocytes.

### Example 10

### PCSK9 siRNAs Reduce Circulating LDLc, ApoB, and PCSK9, but not HDLc in Non-Human Primates (NHPs)

[0327] siRNAs targeting PCSK9 acutely lowered both PCSK9 and total cholesterol levels by 72 hours post-dose and lasted ˜21-30 days after a single dose in mice and rats. To extend these findings to a species whose lipoprotein profiles most closely mimic that of humans, further experiments were performed in the Cynomologous (Cyno) monkey model.

[0328] siRNA 1 (LNP01-10792) and siRNA 2 (LNP-01-9680), both targeting PCSK9 were administered to cynomologous monkeys. As shown in FIG. 12, both siRNAs caused significant lipid lowering for up to 7 days post administration. siRNA 2 caused ˜50% lipid lowering for at least 7 days post-administration, and ˜60% lipid lowering at day 14 post-administration, and siRNA 1 caused ˜60% LDLc lowering for at least 7 days.

[0329] Male Cynos were first pre-screened for those that had LDLc of 40 mg/dl or higher. Chosen animals were then put on a fasted/fed diet regime and acclimated for 11 days. At day −3 and −1 pre-dose, serum was drawn at both fasted and 4 hours post-fed time points and analyzed for total cholesterol (Tc), LDL (LDLc), HDL cholesterol (HDLc) as well as triglycerides (TG), and PCSK9 plasma levels. Animals were randomized based on their day −3 LDLc levels. On the day of dosing (designated day 1), either 1 mg/kg or 5 mg/kg of LNP01-1a2 and 5 mg/kg LNP01-2a1 were injected, along with PBS and 1 mg/kg LNP01-ctrl as controls. All doses were well tolerated with no in-life findings. As the experiment progressed it became apparent (based on LDLc lowering) that the lower dose was not efficacious. We therefore dosed the PBS group animals on day 14 with 5 mg/kg LNP01-ctrl control siRNA, which could then serve as an additional control for the high dose groups of 5 mg/kg LNP01-1a2 and 5 mg/kg LNP01-2a1. Initially blood was drawn from animals on days 3, 4, 5, and 7 post-dose and Tc, HDLc, LDLc, and TGs concentrations were measured. Additional blood draws from the LNP01-1a2, LNP01-2a1 high dose groups were carried out at day 14 and day 21 post-dose (as the LDLc levels had not returned to baseline by day 7).

[0330] As shown in FIG. 12A, a single dose of LNP01-1a2 or LNP01-2a1 resulted in a statistically significant reduction of LDLc beginning at day 3 post-dose that returned to baseline over ˜14 days (for LNP01-1a2) and ˜21 days (LNP01-2a1). This effect was not seen in either the PBS, the control siRNA groups, or the 1 mg/kg treatment groups. LNP01-2a1 resulted in an average lowering of LDLc of 56% 72 hours post-dose, with 1 of 4 animals achieving nearly 70% LDLc, and all others achieving >50% LDLc decrease, as compared to pre-dose levels, (see FIG. 12A. As expected, the lowering of LDLc in the treated animals also correlated with a reduction of circulating ApoB levels as measured by serum ELISA (FIG. 12B). Interestingly, the degree of LDLc lowering observed in this study of Cyno monkey was greater than those that have been reported for high dose statins, as well as, for other current standard of care compounds used for hypercholesterolemia. The onset of action is also much more acute than that of statins with effects being seen as early as 48 hours post-dose.

[0331] Neither LNP01-1a2 nor LNP01-2a1 treatments resulted in a lowering of HDLc. In fact, both molecules resulted (on average) in a trend towards a decreased Tc/HDL ratio (FIG. 12C). In addition, circulating triglyceride levels, and with the exception of one animal, ALT and AST levels were not significantly impacted.

[0332] PCSK9 protein levels were also measured in treated and control animals. As shown in FIG. 11, LNP01-1a2 and LNP01-2a1 treatment each resulted in trends toward decreased circulating PCSK9 protein levels versus pre-dose. Specifically, the more active siRNA LNP01-2a1 demonstrated significant reduction of circulating PCSK9 protein versus both PBS (day 3-21) and LNP01-ctrl siRNA control (day 4, day 7).

### Example 11

### siRNA Modifications Immune Responses to siRNAs

[0333] siRNAs were tested for activation of the immune system in primary human blood monocytes (hPBMC). Two control inducing sequences and the unmodified parental compound AD-1a1 was found to induce both IFN-alpha and TNF-alpha. However, chemically modified versions of this sequence (AD-1a2, AD-1a3, AD-1a5, and AD-1a4) as well as AD-2a1 were negative for both IFN-alpha and TNF-alpha induction in these same assays (see Table 5, and FIGS. 13A and 13B). Thus chemical modifications are capable of dampening both IFN-alpha and TNF-alpha responses to siRNA molecules. In addition, neither AD-1a2, nor AD-2a1 activated IFN-alpha when formulated into liposomes and tested in mice.

### Example 12

### Evaluation of siRNA Conjugates

[0334] AD-10792 was conjugated to GalNAc)3/Cholesterol (FIG. 16) or GalNAc)3/LCO (FIG. 17). The sense strand was synthesized with the conjugate on the 3′ end. The conjugated siRNAs were assayed for effects on PCSK9 transcript levels and total serum cholesterol in mice using the methods described below.

[0335] Briefly, mice were dosed via tail injection with one of the 2 conjugated siRNAs or PBS on three consecutive days: day 0, day 1 and day 2 with a dosage of about 100, 50, 25 or 12.5 mg/kg. Each dosage group included 6 mice. 24 hour post last dosing mice were sacrificed and blood and liver samples were obtained, stored, and processed to determine PCSK9 mRNA levels and total serum cholesterol.

[0336] The results are shown in FIG. 18. Compared to control PBS, both siRNA conjugates demonstrated activity with an ED50 of 3×50 mg/kg for GalNAc)3/Cholesterol conjugated AD-10792 and 3×100 mg/kg for GalNAc)3/LCO conjugated AD-10792. The results indicate that Cholesterol conjugated siRNA with GalNAc are active and capable of silencing PCSK9 in the liver resulting in cholesterol lowering.

[0337] Bolus Dosing

[0338] Bolus dosing of formulated siRNAs in C57/BL6 mice (6/group, 8-10 weeks old, Charles River Laboratories, MA) was performed by tail vein injection using a 27 G needle. SiRNAs were formulated in LNP-01 (and then dialyzed against PBS) and diluted with PBS to concentrations 1.0, 0.5, 0.25 and 0.125 mg/ml allowing the delivery of 100; 50; 25 and 12.5 mg/kg doses in 10 μl/g body weight. Mice were kept under an infrared lamp for approximately 3 min prior to dosing to ease injection.

[0339] 24 hour post last dose mice were sacrificed by CO2-asphyxiation. 0.2 ml blood was collected by retro-orbital bleeding and the liver was harvested and frozen in liquid nitrogen. Serum and livers were stored at −80° C. Frozen livers were grinded using 6850 Freezer/Mill Cryogenic Grinder (SPEX CentriPrep, Inc) and powders stored at −80° C. until analysis.

[0340] PCSK9 mRNA levels were detected using the branched-DNA technology based kit from QuantiGene Reagent System (Panomics, USA) according to the protocol. 10-20 mg of frozen liver powders was lysed in 600 μl of 0.16 μg/ml Proteinase K (Epicentre, #MPRK092) in Tissue and Cell Lysis Solution (Epicentre, #MTC096H) at 65° C. for 3 hours. Then 10 μl of the lysates were added to 90 μl of Lysis Working Reagent (1 volume of stock Lysis Mixture in two volumes of water) and incubated at 52° C. overnight on Genospectra capture plates with probe sets specific to mouse PCSK9 and mouse GAPDH. Probes sets for mouse PCSK9 and mouse GAPDH were purchased from Panomics, USA. Chemo luminescence was read on a Victor2-Light (Perkin Elmer) as Relative light units. The ratio of PCSK9 mRNA to mGAPDH mRNA in liver lysates was averaged over each treatment group and compared to a control group treated with PBS or a control group treated with an unrelated siRNA (blood coagulation factor VII).

[0341] Total serum cholesterol in mouse serum was measured using the Total Cholesterol Assay (Wako, USA) according to manufacturer's instructions. Measurements were taken on a Victor2 1420 Multilabel Counter (Perkin Elmer) at 600 nm.

### Example 13

### Evaluation of Lipid Formulated siRNAs

[0342] Briefly, rats were dosed via tail injection with SNALP formulated siRNAs or PBS with a single dosage of about 0.3; 1 and 3 mg/kg of SNALP formulated AD-10792. Each dosage group included 5 rats. 72 hour post dosing rats were sacrificed and blood and liver samples were obtained, stored, and processed to determine PCSK9 mRNA and total serum cholesterol levels. The results are shown in FIG. 19. Compared to control PBS, SNALP formulated AD-10792 (FIG. 19A) had an ED50 of about 1.0 mg/kg for both lowering of PCSK9 transcript levels and total serum cholesterol levels. These results show that administration of SNALP formulated siRNA results in effective and efficient silencing of PCSK9 and subsequent lowering of total cholesterol in vivo.

[0343] Bolus Dosing

[0344] Bolus dosing of formulated siRNAs in Sprague-Dawley rats (5/group, 170-190 g body weight, Charles River Laboratories, MA) was performed by tail vein injection using a 27 G needle. SiRNAs were formulated in SNALP (and then dialyzed against PBS) and diluted with PBS to concentrations 0.066; 0.2 and 0.6 mg/ml allowing the delivery of 0.3; 1.0 and 3.0 mg/kg of SNALP formulated AD-10792 in 5 μl/g body weight. Rats were kept under an infrared lamp for approximately 3 min prior to dosing to ease injection.

[0345] 72 hour post last dose rats were sacrificed by CO2-asphyxiation. 0.2 ml blood was collected by retro-orbital bleeding and the liver was harvested and frozen in liquid nitrogen. Serum and livers were stored at −80° C. Frozen livers were grinded using 6850 Freezer/Mill Cryogenic Grinder (SPEX CentriPrep, Inc) and powders stored at −80° C. until analysis.

[0346] PCSK9 mRNA levels were detected using the branched-DNA technology based kit from QuantiGene Reagent System (Panomics, USA) according to the protocol. 10-20 mg of frozen liver powders was lysed in 600 μl of 0.16 μg/ml Proteinase K (Epicentre, #MPRK092) in Tissue and Cell Lysis Solution (Epicentre, #MTC096H) at 65° C. for 3 hours. Then 10 μl of the lysates were added to 90 μl of Lysis Working Reagent (1 volume of stock Lysis Mixture in two volumes of water) and incubated at 52° C. overnight on Genospectra capture plates with probe sets specific to rat PCSK9 and rat GAPDH. Probes sets for rat PCSK9 and rat GAPDH were purchased from Panomics, USA. Chemo luminescence was read on a Victor2-Light (Perkin Elmer) as Relative light units. The ratio of rat PCSK9 mRNA to rat GAPDH mRNA in liver lysates was averaged over each treatment group and compared to a control group treated with PBS or a control group treated with an unrelated siRNA (blood coagulation factor VII).

[0347] Total serum cholesterol in rat serum was measured using the Total Cholesterol Assay (Wako, USA) according to manufacturer's instructions. Measurements were taken on a Victor2 1420 Multilabel Counter (Perkin Elmer) at 600 nm.

### Example 14

### In Vitro Efficacy Screen of Mismatch Walk of AD-9680 and AD-14676

[0348] The effects of variations in sequence or modification on the effectiveness of AD-9680 and AD-14676 were assayed in HeLa cells. A number of variants were synthesized as shown in Table 6.

[0349] HeLa were plated in 96-well plates (8,000-10,000 cells/well) in 100 μl 10% fetal bovine serum in Dulbecco's Modified Eagle Medium (DMEM). When the cells reached approximately 50% confluence (˜24 hours later) they were transfected with serial four-fold dilutions of siRNA starting at 10 nM. 0.4 μl of transfection reagent Lipofectamine™ 2000 (Invitrogen Corporation, Carlsbad, Calif.) was used per well and transfections were performed according to the manufacturer's protocol. Namely, the siRNA: Lipofectamine™ 2000 complexes were prepared as follows. The appropriate amount of siRNA was diluted in Opti-MEM I Reduced Serum Medium without serum and mixed gently. The Lipofectamine™ 2000 was mixed gently before use, then for each well of a 96 well plate 0.4 μl was diluted in 25 μl of Opti-MEM I Reduced Serum Medium without serum and mixed gently and incubated for 5 minutes at room temperature. After the 5 minute incubation, 1 μl of the diluted siRNA was combined with the diluted Lipofectamine™ 2000 (total volume is 26.4 μl). The complex was mixed gently and incubated for 20 minutes at room temperature to allow the siRNA: Lipofectamine™ 2000 complexes to form. Then 100 μl of 10% fetal bovine serum in DMEM was added to each of the siRNA:Lipofectamine™ 2000 complexes and mixed gently by rocking the plate back and forth. 100 μl of the above mixture was added to each well containing the cells and the plates were incubated at 37° C. in a CO2 incubator for 24 hours, then the culture medium was removed and 100 μl 10% fetal bovine serum in DMEM was added.

[0350] 24 hours post medium change medium was removed, cells were lysed and cell lysates assayed for PCSK9 mRNA silencing by bDNA assay (Panomics, USA) following the manufacturer's protocol. Chemo luminescence was read on a Victor2-Light (Perkin Elmer) as Relative light units. The ratio of human PCSK9 mRNA to human GAPDH mRNA in cell lysates was compared to that of cells treated with Lipofectamine™ 2000 only control.

[0351] FIG. 20 is dose response curves of a series of compounds related to AD-9680. FIG. 21 is a dose response curve of a series of compounds related to AD-14676 (21A) The results show that DFTs or mismatches in certain positions are able increase the activity (as evidenced by lower IC50 values) of both parent compounds. Without being bound by theory, it is hypothesized that destabilization of the sense strand through the introduction of mismatches, or DFT might result in quicker removal of the sense strand.

### Example 15

### Inhibition of PCSK9 Expression in Humans

[0352] A human subject is treated with a dsRNA targeted to a PCSK9 gene to inhibit expression of the PCSK9 gene and lower cholesterol levels for an extended period of time following a single dose.

[0353] A subject in need of treatment is selected or identified. The subject can be in need of LDL lowering, LDL lowering without lowering of HDL, ApoB lowering, or total cholesterol lowering. The identification of the subject can occur in a clinical setting, or elsewhere, e.g., in the subject's home through the subject's own use of a self-testing kit.

[0354] At time zero, a suitable first dose of an anti-PCSK9 siRNA is subcutaneously administered to the subject. The dsRNA is formulated as described herein. After a period of time following the first dose, e.g., 7 days, 14 days, and 21 days, the subject's condition is evaluated, e.g., by measuring LDL, ApoB, and/or total cholesterol levels. This measurement can be accompanied by a measurement of PCSK9 expression in said subject, and/or the products of the successful siRNA-targeting of PCSK9 mRNA. Other relevant criteria can also be measured. The number and strength of doses are adjusted according to the subject's needs.

[0355] After treatment, the subject's LDL, ApoB, or total cholesterol levels are lowered relative to the levels existing prior to the treatment, or relative to the levels measured in a similarly afflicted but untreated subject.

[0356] Those skilled in the art are familiar with methods and compositions in addition to those specifically set out in the present disclosure which will allow them to practice this invention to the full scope of the claims hereinafter appended.

TABLE 1a
dsRNA sequences targeted to PCSK9

| | | | | | |
|---|---|---|---|---|---|
| position | | | | | |
| in | | | | | |
| human | | SEQ | | SEQ | |
| access. # | | ID | | ID | Duplex |
| NM_174936 | Sense strand sequence (5′-3′)¹ | NO: | Antisense-strand sequence (5′-3′)¹ | NO: | name |

| | | | | | |
|---|---|---|---|---|---|
| 2-20 | AGCGACGUCGAGGCGCUCATT | 1 | UGAGCGCCUCGACGUCGCUTT | 2 | AD- |
| | | | | | 15220 |
| 15-33 | CGCUCAUGGUUGCAGGCGGTT | 3 | CCGCCUGCAACCAUGAGCGTT | 4 | AD- |
| | | | | | 15275 |
| 16-34 | GCUCAUGGUUGCAGGCGGGTT | 5 | CCCGCCUGCAACCAUGAGCTT | 6 | AD- |
| | | | | | 15301 |
| 30-48 | GCGGGCGCCGCCGUUCAGUTT | 7 | ACUGAACGGCGGCGCCCGCTT | 8 | AD- |
| | | | | | 15276 |
| 31-49 | CGGGCGCCGCCGUUCAGUUTT | 9 | AACUGAACGGCGGCGCCCGTT | 10 | AD- |
| | | | | | 15302 |
| 32-50 | GGGCGCCGCCGUUCAGUUCTT | 11 | GAACUGAACGGCGGCGCCCTT | 12 | AD- |
| | | | | | 15303 |
| 40-58 | CCGUUCAGUUCAGGGUCUGTT | 13 | CAGACCCUGAACUGAACGGTT | 14 | AD- |
| | | | | | 15221 |
| 43-61 | UUCAGUUCAGGGUCUGAGCTT | 15 | GCUCAGACCCUGAACUGAATT | 16 | AD- |
| | | | | | 15413 |
| 82-100 | GUGAGACUGGCUCGGGCGGTT | 17 | CCGCCCGAGCCAGUCUCACTT | 18 | AD- |
| | | | | | 15304 |
| 100-118 | GGCCGGGACGCGUCGUUGCTT | 19 | GCAACGACGCGUCCCGGCCTT | 20 | AD- |
| | | | | | 15305 |
| 101-119 | GCCGGGACGCGUCGUUGCATT | 21 | UGCAACGACGCGUCCCGGCTT | 22 | AD- |
| | | | | | 15306 |
| 102-120 | CCGGGACGCGUCGUUGCAGTT | 23 | CUGCAACGACGCGUCCCGGTT | 24 | AD- |
| | | | | | 15307 |
| 105-123 | GGACGCGUCGUUGCAGCAGTT | 25 | CUGCUGCAACGACGCGUCCTT | 26 | AD- |
| | | | | | 15277 |
| 135-153 | UCCCAGCCAGGAUUCCGCGTsT | 27 | CGCGGAAUCCUGGCUGGGATsT | 28 | AD- |
| | | | | | 9526 |
| 135-153 | ucccAGccAGGAuuccGcGTsT | 29 | CGCGGAAUCCUGGCUGGGATsT | 30 | AD- |
| | | | | | 9652 |
| 136-154 | CCCAGCCAGGAUUCCGCGCTsT | 31 | GCGCGGAAUCCUGGCUGGGTsT | 32 | AD- |
| | | | | | 9519 |
| 136-154 | cccAGccAGGAuuccGcGcTsT | 33 | GCGCGGAAUCCUGGCUGGGTsT | 34 | AD- |
| | | | | | 9645 |
| 138-156 | CAGCCAGGAUUCCGCGCGCTsT | 35 | GCGCGCGGAAUCCUGGCUGTsT | 36 | AD- |
| | | | | | 9523 |
| 138-156 | cAGccAGGAuuccGcGcGcTsT | 37 | GCGCGCGGAAUCCUGGCUGTsT | 38 | AD- |
| | | | | | 9649 |
| 185-203 | AGCUCCUGCACAGUCCUCCTsT | 39 | GGAGGACUGUGCAGGAGCUTsT | 40 | AD- |
| | | | | | 9569 |
| 185-203 | AGcuccuGcAcAGuccuccTsT | 41 | GGAGGACUGUGcAGGAGCUTsT | 42 | AD- |
| | | | | | 9695 |
| 205-223 | CACCGCAAGGCUCAAGGCGTT | 43 | CGCCUUGAGCCUUGCGGUGTT | 44 | AD- |
| | | | | | 15222 |
| 208-226 | CGCAAGGCUCAAGGCGCCGTT | 45 | CGGCGCCUUGAGCCUUGCGTT | 46 | AD- |
| | | | | | 15278 |
| 210-228 | CAAGGCUCAAGGCGCCGCCTT | 47 | GGCGGCGCCUUGAGCCUUGTT | 48 | AD- |
| | | | | | 15178 |
| 232-250 | GUGGACCGCGCACGGCCUCTT | 49 | GAGGCCGUGCGCGGUCCACTT | 50 | AD- |
| | | | | | 15308 |
| 233-251 | UGGACCGCGCACGGCCUCUTT | 51 | AGAGGCCGUGCGCGGUCCATT | 52 | AD- |
| | | | | | 15223 |
| 234-252 | GGACCGCGCACGGCCUCUATT | 53 | UAGAGGCCGUGCGCGGUCCTT | 54 | AD- |
| | | | | | 15309 |
| 235-253 | GACCGCGCACGGCCUCUAGTT | 55 | CUAGAGGCCGUGCGCGGUCTT | 56 | AD- |
| | | | | | 15279 |
| 236-254 | ACCGCGCACGGCCUCUAGGTT | 57 | CCUAGAGGCCGUGCGCGGUTT | 58 | AD- |
| | | | | | 15194 |
| 237-255 | CCGCGCACGGCCUCUAGGUTT | 59 | ACCUAGAGGCCGUGCGCGGTT | 60 | AD- |
| | | | | | 15310 |
| 238-256 | CGCGCACGGCCUCUAGGUCTT | 61 | GACCUAGAGGCCGUGCGCGTT | 62 | AD- |
| | | | | | 15311 |
| 239-257 | GCGCACGGCCUCUAGGUCUTT | 63 | AGACCUAGAGGCCGUGCGCTT | 64 | AD- |
| | | | | | 15392 |
| 240-258 | CGCACGGCCUCUAGGUCUCTT | 65 | GAGACCUAGAGGCCGUGCGTT | 66 | AD- |
| | | | | | 15312 |
| 248-266 | CUCUAGGUCUCCUCGCCAGTT | 67 | CUGGCGAGGAGACCUAGAGTT | 68 | AD- |
| | | | | | 15313 |
| 249-267 | UCUAGGUCUCCUCGCCAGGTT | 69 | CCUGGCGAGGAGACCUAGATT | 70 | AD- |
| | | | | | 15280 |
| 250-268 | CUAGGUCUCCUCGCCAGGATT | 71 | UCCUGGCGAGGAGACCUAGTT | 72 | AD- |
| | | | | | 15267 |
| 252-270 | AGGUCUCCUCGCCAGGACATT | 73 | UGUCCUGGCGAGGAGACCUTT | 74 | AD- |
| | | | | | 15314 |
| 258-276 | CCUCGCCAGGACAGCAACCTT | 75 | GGUUGCUGUCCUGGCGAGGTT | 76 | AD- |
| | | | | | 15315 |
| 300-318 | CGUCAGCUCCAGGCGGUCCTsT | 77 | GGACCGCCUGGAGCUGACGTsT | 78 | AD- |
| | | | | | 9624 |
| 300-318 | cGucAGcuccAGGcGGuccTsT | 79 | GGACCGCCUGGAGCUGACGTsT | 80 | AD- |
| | | | | | 9750 |
| 301-319 | GUCAGCUCCAGGCGGUCCUTsT | 81 | AGGACCGCCUGGAGCUGACTsT | 82 | AD- |
| | | | | | 9623 |
| 301-319 | GucAGcuccAGGcGGuccuTsT | 83 | AGGACCGCCUGGAGCUGACTsT | 84 | AD- |
| | | | | | 9749 |
| 370-388 | GGCGCCCGUGCGCAGGAGGTT | 85 | CCUCCUGCGCACGGGCGCCTT | 86 | AD- |
| | | | | | 15384 |
| 408-426 | GGAGCUGGUGCUAGCCUUGTsT | 87 | CAAGGCUAGCACCAGCUCCTsT | 88 | AD- |
| | | | | | 9607 |
| 408-426 | GGAGcuGGuGcuAGccuuGTsT | 89 | cAAGGCuAGcACcAGCUCCTsT | 90 | AD- |
| | | | | | 9733 |
| 411-429 | GCUGGUGCUAGCCUUGCGUTsT | 91 | ACGCAAGGCUAGCACCAGCTsT | 92 | AD- |
| | | | | | 9524 |
| 411-429 | GcuGGuGcuAGccuuGcGuTsT | 93 | ACGcAAGGCuAGcACcAGCTsT | 94 | AD- |
| | | | | | 9650 |
| 412-430 | CUGGUGCUAGCCUUGCGUUTsT | 95 | AACGCAAGGCUAGCACCAGTsT | 96 | AD- |
| | | | | | 9520 |
| 412-430 | CUGGUGCUAGCCUUGCGUUTsT | 97 | AACGCAAGGCUAGCACCAGTsT | 98 | AD- |
| | | | | | 9520 |
| 412-430 | cuGGuGcuAGccuuGcGuuTsT | 99 | AACGcAAGGCuAGcACcAGTsT | 100 | AD- |
| | | | | | 9646 |
| 416-434 | UGCUAGCCUUGCGUUCCGATsT | 101 | UCGGAACGCAAGGCUAGCATsT | 102 | AD- |
| | | | | | 9608 |
| 416-434 | uGcuAGccuuGcGuuccGATsT | 103 | UCGGAACGcAAGGCuAGcATsT | 104 | AD- |
| | | | | | 9734 |
| 419-437 | UAGCCUUGCGUUCCGAGGATsT | 105 | UCCUCGGAACGCAAGGCUATsT | 106 | AD- |
| | | | | | 9546 |
| 419-437 | uAGccuuGcGuuccGAGGATsT | 107 | UCCUCGGAACGcAAGGCuATsT | 108 | AD- |
| | | | | | 9672 |
| 439-457 | GACGGCCUGGCCGAAGCACTT | 109 | GUGCUUCGGCCAGGCCGUCTT | 110 | AD- |
| | | | | | 15385 |
| 447-465 | GGCCGAAGCACCCGAGCACTT | 111 | GUGCUCGGGUGCUUCGGCCTT | 112 | AD- |
| | | | | | 15393 |
| 448-466 | GCCGAAGCACCCGAGCACGTT | 113 | CGUGCUCGGGUGCUUCGGCTT | 114 | AD- |
| | | | | | 15316 |
| 449-467 | CCGAAGCACCCGAGCACGGTT | 115 | CCGUGCUCGGGUGCUUCGGTT | 116 | AD- |
| | | | | | 15317 |
| 458-476 | CCGAGCACGGAACCACAGCTT | 117 | GCUGUGGUUCCGUGCUCGGTT | 118 | AD- |
| | | | | | 15318 |
| 484-502 | CACCGCUGCGCCAAGGAUCTT | 119 | GAUCCUUGGCGCAGCGGUGTT | 120 | AD- |
| | | | | | 15195 |
| 486-504 | CCGCUGCGCCAAGGAUCCGTT | 121 | CGGAUCCUUGGCGCAGCGGTT | 122 | AD- |
| | | | | | 15224 |
| 487-505 | CGCUGCGCCAAGGAUCCGUTT | 123 | ACGGAUCCUUGGCGCAGCGTT | 124 | AD- |
| | | | | | 15188 |
| 489-507 | CUGCGCCAAGGAUCCGUGGTT | 125 | CCACGGAUCCUUGGCGCAGTT | 126 | AD- |
| | | | | | 15225 |
| 500-518 | AUCCGUGGAGGUUGCCUGGTT | 127 | CCAGGCAACCUCCACGGAUTT | 128 | AD- |
| | | | | | 15281 |
| 509-527 | GGUUGCCUGGCACCUACGUTT | 129 | ACGUAGGUGCCAGGCAACCTT | 130 | AD- |
| | | | | | 15282 |
| 542-560 | AGGAGACCCACCUCUCGCATT | 131 | UGCGAGAGGUGGGUCUCCUTT | 132 | AD |
| | | | | | 15319 |
| 543-561 | GGAGACCCACCUCUCGCAGTT | 133 | CUGCGAGAGGUGGGUCUCCTT | 134 | AD- |
| | | | | | 15226 |
| 544-562 | GAGACCCACCUCUCGCAGUTT | 135 | ACUGCGAGAGGUGGGUCUCTT | 136 | AD- |
| | | | | | 15271 |
| 549-567 | CCACCUCUCGCAGUCAGAGTT | 137 | CUCUGACUGCGAGAGGUGGTT | 138 | AD- |
| | | | | | 15283 |
| 552-570 | CCUCUCGCAGUCAGAGCGCTT | 139 | GCGCUCUGACUGCGAGAGGTT | 140 | AD- |
| | | | | | 15284 |
| 553-571 | CUCUCGCAGUCAGAGCGCATT | 141 | UGCGCUCUGACUGCGAGAGTT | 142 | AD- |
| | | | | | 15189 |
| 554-572 | UCUCGCAGUCAGAGCGCACTT | 143 | GUGCGCUCUGACUGCGAGATT | 144 | AD- |
| | | | | | 15227 |
| 555-573 | CUCGCAGUCAGAGCGCACUTsT | 145 | AGUGCGCUCUGACUGCGAGTsT | 146 | AD- |
| | | | | | 9547 |
| 555-573 | cucGcAGucAGAGcGcAcuTsT | 147 | AGUGCGCUCUGACUGCGAGTsT | 148 | AD- |
| | | | | | 9673 |
| 558-576 | GCAGUCAGAGCGCACUGCCTsT | 149 | GGCAGUGCGCUCUGACUGCTsT | 150 | AD- |
| | | | | | 9548 |
| 558-576 | GcAGucAGAGcGcAcuGccTsT | 151 | GGcAGUGCGCUCUGACUGCTsT | 152 | AD- |
| | | | | | 9674 |
| 606-624 | GGGAUACCUCACCAAGAUCTsT | 153 | GAUCUUGGUGAGGUAUCCCTsT | 154 | AD- |
| | | | | | 9529 |
| 606-624 | GGGAuAccucAccAAGAucTsT | 155 | GAUCUUGGUGAGGuAUCCCTsT | 156 | AD- |
| | | | | | 9655 |
| 659-677 | UGGUGAAGAUGAGUGGCGATsT | 157 | UCGCCACUCAUCUUCACCATsT | 158 | AD- |
| | | | | | 9605 |
| 659-677 | uGGuGAAGAuGAGuGGcGATsT | 159 | UCGCcACUcAUCUUcACcATsT | 160 | AD- |
| | | | | | 9731 |
| 663-681 | GAAGAUGAGUGGCGACCUGTsT | 161 | CAGGUCGCCACUCAUCUUCTsT | 162 | AD- |
| | | | | | 9596 |
| 663-681 | GAAGAuGAGuGGcGAccuGTsT | 163 | cAGGUCGCcACUcAUCUUCTsT | 164 | AD- |
| | | | | | 9722 |
| 704-722 | CCCAUGUCGACUACAUCGATsT | 165 | UCGAUGUAGUCGACAUGGGTsT | 166 | AD- |
| | | | | | 9583 |
| 704-722 | cccAuGucGAcuAcAucGATsT | 167 | UCGAUGuAGUCGAcAUGGGTsT | 168 | AD- |
| | | | | | 9709 |
| 718-736 | AUCGAGGAGGACUCCUCUGTsT | 169 | CAGAGGAGUCCUCCUCGAUTsT | 170 | AD- |
| | | | | | 9579 |
| 718-736 | AucGAGGAGGAcuccucuGTsT | 171 | cAGAGGAGUCCUCCUCGAUTsT | 172 | AD- |
| | | | | | 9705 |
| 758-776 | GGAACCUGGAGCGGAUUACTT | 173 | GUAAUCCGCUCCAGGUUCCTT | 174 | AD- |
| | | | | | 15394 |
| 759-777 | GAACCUGGAGCGGAUUACCTT | 175 | GGUAAUCCGCUCCAGGUUCTT | 176 | AD- |
| | | | | | 15196 |
| 760-778 | AACCUGGAGCGGAUUACCCTT | 177 | GGGUAAUCCGCUCCAGGUUTT | 178 | AD- |
| | | | | | 15197 |
| 777-795 | CCCUCCACGGUACCGGGCGTT | 179 | CGCCCGGUACCGUGGAGGGTT | 180 | AD- |
| | | | | | 15198 |
| 782-800 | CACGGUACCGGGCGGAUGATsT | 181 | UCAUCCGCCCGGUACCGUGTsT | 182 | AD- |
| | | | | | 9609 |
| 782-800 | cAcGGuAccGGGcGGAuGATsT | 183 | UcAUCCGCCCGGuACCGUGTsT | 184 | AD- |
| | | | | | 9735 |
| 783-801 | ACGGUACCGGGCGGAUGAATsT | 185 | UUCAUCCGCCCGGUACCGUTsT | 186 | AD- |
| | | | | | 9537 |
| 783-801 | AcGGuAccGGGcGGAuGAATsT | 187 | UUcAUCCGCCCGGuACCGUTsT | 188 | AD- |
| | | | | | 9663 |
| 784-802 | CGGUACCGGGCGGAUGAAUTsT | 189 | AUUCAUCCGCCCGGUACCGTsT | 190 | AD- |
| | | | | | 9528 |
| 784-802 | cGGuAccGGGcGGAuGAAuTsT | 191 | AUUcAUCCGCCCGGuACCGTsT | 192 | AD- |
| | | | | | 9654 |
| 785-803 | GGUACCGGGCGGAUGAAUATsT | 193 | UAUUCAUCCGCCCGGUACCTsT | 194 | AD- |
| | | | | | 9515 |
| 785-803 | GGuAccGGGcGGAuGAAuATsT | 195 | uAUUcAUCCGCCCGGuACCTsT | 196 | AD- |
| | | | | | 9641 |
| 786-804 | GUACCGGGCGGAUGAAUACTsT | 197 | GUAUUCAUCCGCCCGGUACTsT | 198 | AD- |
| | | | | | 9514 |
| 786-804 | GuAccGGGcGGAuGAAuAcTsT | 199 | GuAUUcAUCCGCCCGGuACTsT | 200 | AD- |
| | | | | | 9640 |
| 788-806 | ACCGGGCGGAUGAAUACCATsT | 201 | UGGUAUUCAUCCGCCCGGUTsT | 202 | AD- |
| | | | | | 9530 |
| 788-806 | AccGGGcGGAuGAAuAccATsT | 203 | UGGuAUUcAUCCGCCCGGUTsT | 204 | AD- |
| | | | | | 9656 |
| 789-807 | CCGGGCGGAUGAAUACCAGTsT | 205 | CUGGUAUUCAUCCGCCCGGTsT | 206 | AD- |
| | | | | | 9538 |
| 789-807 | ccGGGcGGAuGAAuAccAGTsT | 207 | CUGGuAUUcAUCCGCCCGGTsT | 208 | AD- |
| | | | | | 9664 |
| 825-843 | CCUGGUGGAGGUGUAUCUCTsT | 209 | GAGAUACACCUCCACCAGGTsT | 210 | AD- |
| | | | | | 9598 |
| 825-843 | ccuGGuGGAGGuGuAucucTsT | 211 | GAGAuAcACCUCcACcAGGTsT | 212 | AD- |
| | | | | | 9724 |
| 826-844 | CUGGUGGAGGUGUAUCUCCTsT | 213 | GGAGAUACACCUCCACCAGTsT | 214 | AD- |
| | | | | | 9625 |
| 826-844 | cuGGuGGAGGuGuAucuccTsT | 215 | GGAGAuAcACCUCcACcAGTsT | 216 | AD- |
| | | | | | 9751 |
| 827-845 | UGGUGGAGGUGUAUCUCCUTsT | 217 | AGGAGAUACACCUCCACCATsT | 218 | AD- |
| | | | | | 9556 |
| 827-845 | uGGuGGAGGuGuAucuccuTsT | 219 | AGGAGAuAcACCUCcACcATsT | 220 | AD- |
| | | | | | 9682 |
| 828-846 | GGUGGAGGUGUAUCUCCUATsT | 221 | UAGGAGAUACACCUCCACCTsT | 222 | AD- |
| | | | | | 9539 |
| 828-846 | GGuGGAGGuGuAucuccuATsT | 223 | uAGGAGAuAcACCUCcACCTsT | 224 | AD- |
| | | | | | 9665 |
| 831-849 | GGAGGUGUAUCUCCUAGACTsT | 225 | GUCUAGGAGAUACACCUCCTsT | 226 | AD- |
| | | | | | 9517 |
| 831-849 | GGAGGuGuAucuccuAGAcTsT | 227 | GUCuAGGAGAuAcACCUCCTsT | 228 | AD- |
| | | | | | 9643 |
| 833-851 | AGGUGUAUCUCCUAGACACTsT | 229 | GUGUCUAGGAGAUACACCUTsT | 230 | AD- |
| | | | | | 9610 |
| 833-851 | AGGuGuAucuccuAGAcAcTsT | 231 | GUGUCuAGGAGAuAcACCUTsT | 232 | AD- |
| | | | | | 9736 |
| 833-851 | AfgGfuGfuAfuCfuCfcUfaGfaCfaC | 233 | p- | 234 | AD- |
| | fTsT | | gUfgUfcUfaGfgAfgAfuAfcAfcCfuTsT | | 14681 |
| 833-851 | AGGUfGUfAUfCfUfCfCfUfAGACfAC | 235 | GUfGUfCfUfAGGAGAUfACfACfCfUfTsT | 236 | AD- |
| | fTsT | | | | 14691 |
| 833-851 | AgGuGuAuCuCcUaGaCaCTsT | 237 | p- | 238 | AD- |
| | | | gUfgUfcUfaGfgAfgAfuAfcAfcCfuTsT | | 14701 |
| 833-851 | AgGuGuAuCuCcUaGaCaCTsT | 239 | GUfGUfCfUfAGGAGAUfACfACfCfUfTsT | 240 | AD- |
| | | | | | 14711 |
| 833-851 | AfgGfuGfuAfuCfuCfcUfaGfaCfaC | 241 | GUGUCuaGGagAUACAccuTsT | 242 | AD- |
| | fTsT | | | | 14721 |
| 833-851 | AGGUfGUfAUfCfUfCfCfUfAGACfAC | 243 | GUGUCuaGGagAUACAccuTsT | 244 | AD- |
| | fTsT | | | | 14731 |
| 833-851 | AgGuGuAuCuCcUaGaCaCTsT | 245 | GUGUCuaGGagAUACAccuTsT | 246 | AD- |
| | | | | | 14741 |
| 833-851 | GfcAfcCfcUfcAfuAfgGfcCfuGfgA | 247 | p- | 248 | AD- |
| | fTsT | | uCfcAfgGfcCfuAfuGfaGfgGfuGfcTsT | | 15087 |
| 833-851 | GCfACfCfCfUfCfAUfAGGCfCfUfGG | 249 | UfCfCfAGGCfCfUfAUfGAGGGUfGCfTsT | 250 | AD- |
| | ATsT | | | | 15097 |
| 833-851 | GcAcCcUcAuAgGcCuGgATsT | 251 | p- | 252 | AD- |
| | | | uCfcAfgGfcCfuAfuGfaGfgGfuGfcTsT | | 15107 |
| 833-851 | GcAcCcUcAuAgGcCuGgATsT | 253 | UfCfCfAGGCfCfUfAUfGAGGGUfGCfTsT | 254 | AD- |
| | | | | | 15117 |
| 833-851 | GfcAfcCfcUfcAfuAfgGfcCfuGfgA | 255 | UCCAGgcCUauGAGGGugcTsT | 256 | AD- |
| | fTsT | | | | 15127 |
| 833-851 | GCfACfCfCfUfCfAUfAGGCfCfUfGG | 257 | UCCAGgcCUauGAGGGugcTsT | 258 | AD- |
| | ATsT | | | | 15137 |
| 833-851 | GcAcCcUcAuAgGcCuGgATsT | 259 | UCCAGgcCUauGAGGGugcTsT | 260 | AD- |
| | | | | | 15147 |
| 836-854 | UGUAUCUCCUAGACACCAGTsT | 261 | CUGGUGUCUAGGAGAUACATsT | 262 | AD- |
| | | | | | 9516 |
| 836-854 | uGuAucuccuAGAcAccAGTsT | 263 | CUGGUGUCuAGGAGAuAcATsT | 264 | AD- |
| | | | | | 9642 |
| 840-858 | UCUCCUAGACACCAGCAUATsT | 265 | UAUGCUGGUGUCUAGGAGATsT | 266 | AD- |
| | | | | | 9562 |
| 840-858 | ucuccuAGAcAccAGcAuATsT | 267 | uAUGCUGGUGUCuAGGAGATsT | 268 | AD- |
| | | | | | 9688 |
| 840-858 | UfcUfcCfuAfgAfcAfcCfaGfcAfuA | 269 | p- | 270 | AD- |
| | fTsT | | uAfuGfcUfgGfuGfuCfuAfgGfaGfaTsT | | 14677 |
| 840-858 | UfCfUfCfCfUfAGACfACfCfAGCfAU | 271 | UfAUfGCfUfGGUfGUfCfUfAGGAGATsT | 272 | AD- |
| | fATsT | | | | 14687 |
| 840-858 | UcUcCuAgAcAcCaGcAuATsT | 273 | p- | 274 | AD- |
| | | | uAfuGfcUfgGfuGfuCfuAfgGfaGfaTsT | | 14697 |
| 840-858 | UcUcCuAgAcAcCaGcAuATsT | 275 | UfAUfGCfUfGGUfGUfCfUfAGGAGATsT | 276 | AD- |
| | | | | | 14707 |
| 840-585 | UfcUfcCfuAafAfcAfcCfaGfcAfuA | 277 | UAUGCugGUguCUAGGagaTsT | 278 | AD- |
| | fTsT | | | | 14717 |
| 840-858 | UfCfUfCfCfUfAGACfACfCfAGCfAU | 279 | UAUGCugGUguCUAGGagaTsT | 280 | AD- |
| | fATsT | | | | 14727 |
| 840-858 | UcUcCuAgAcAcCaGcAuATsT | 281 | UAUGCugGUguCUAGGagaTsT | 282 | AD- |
| | | | | | 14737 |
| 840-858 | AfgGfcCfuGfgAfgUfuUfaUfuCfgG | 283 | p- | 284 | AD- |
| | fTsT | | cCfgAfaUfaAfaCfuCfcAfgGfcCfuTsT | | 15083 |
| 840-858 | AGGCfCfUfGGAGUfUfUfAUfUfCfGG | 285 | CfCfGAAUfAAACfUfCfCfAGGCfCfUfTsT | 286 | AD- |
| | TsT | | | | 15093 |
| 840-858 | AgGcCuGgAgUuUaUuCgGTsT | 287 | p- | 288 | AD- |
| | | | cCfgAfaUfaAfaCfuCfcAfgGfcCfuTsT | | 15103 |
| 840-858 | AgGcCuGgAgUuUaUuCgGTsT | 289 | CfCfGAAUfAAACfUfCfCfAGGCfCfUfTsT | 290 | AD- |
| | | | | | 15113 |
| 840-858 | AfgGfcCfuGfgAfgUfuUfaUfuCfgG | 291 | CCGAAuaAAcuCCAGGccuTsT | 292 | AD- |
| | fTsT | | | | 15123 |
| 840-858 | AGGCfCfUfGGAGUfUfUfAUfUfCfGG | 293 | CCGAAuaAAcuCCAGGccuTsT | 294 | AD- |
| | TsT | | | | 15133 |
| 840-858 | AgGcCuGgAgUuUaUuCgGTsT | 295 | CCGAAuaAAcuCCAGGccuTsT | 296 | AD- |
| | | | | | 15143 |
| 841-859 | CUCCUAGACACCAGCAUACTsT | 297 | GUAUGCUGGUGUCUAGGAGTsT | 298 | AD- |
| | | | | | 9521 |
| 841-859 | cuccuAGAcAccAGcAuAcTsT | 299 | GuAUGCUGGUGUCuAGGAGTsT | 300 | AD- |
| | | | | | 9647 |
| 842-860 | UCCUAGACACCAGCAUACATsT | 301 | UGUAUGCUGGUGUCUAGGATsT | 302 | AD- |
| | | | | | 9611 |
| 842-860 | uccuAGAcAccAGcAuAcATsT | 303 | UGuAUGCUGGUGUCuAGGATsT | 304 | AD- |
| | | | | | 9737 |
| 843-861 | CCUAGACACCAGCAUACAGTsT | 305 | CUGUAUGCUGGUGUCUAGGTsT | 306 | AD- |
| | | | | | 9592 |
| 843-861 | ccuAGAcAccAGcAuAcAGTsT | 307 | CUGuAUGCUGGUGUCuAGGTsT | 308 | AD- |
| | | | | | 9718 |
| 847-865 | GACACCAGCAUACAGAGUGTsT | 309 | CACUCUGUAUGCUGGUGUCTsT | 310 | AD- |
| | | | | | 9561 |
| 847-865 | GAcAccAGcAuAcAGAGuGTsT | 311 | cACUCUGuAUGCUGGUGUCTsT | 312 | AD- |
| | | | | | 9687 |
| 855-873 | CAUACAGAGUGACCACCGGTsT | 313 | CCGGUGGUCACUCUGUAUGTsT | 314 | AD- |
| | | | | | 9636 |
| 855-873 | cAuAcAGAGuGAccAccGGTsT | 315 | CCGGUGGUcACUCUGuAUGTsT | 316 | AD- |
| | | | | | 9762 |
| 860-878 | AGAGUGACCACCGGGAAAUTsT | 317 | AUUUCCCGGUGGUCACUCUTsT | 318 | AD- |
| | | | | | 9540 |
| 860-878 | AGAGuGAccAccGGGAAAuTsT | 319 | AUUUCCCGGUGGUcACUCUTsT | 320 | AD- |
| | | | | | 9666 |
| 861-879 | GAGUGACCACCGGGAAAUCTsT | 321 | GAUUUCCCGGUGGUCACUCTsT | 322 | AD- |
| | | | | | 9535 |
| 861-879 | GAGuGAccAccGGGAAAucTsT | 323 | GAUUUCCCGGUGGUcACUCTsT | 324 | AD- |
| | | | | | 9661 |
| 863-881 | GUGACCACCGGGAAAUCGATsT | 325 | UCGAUUUCCCGGUGGUCACTsT | 326 | AD- |
| | | | | | 9559 |
| 863-881 | GuGAccAccGGGAAAucGATsT | 327 | UCGAUUUCCCGGUGGUcACTsT | 328 | AD- |
| | | | | | 9685 |
| 865-883 | GACCACCGGGAAAUCGAGGTsT | 329 | CCUCGAUUUCCCGGUGGUCTsT | 330 | AD- |
| | | | | | 9533 |
| 865-883 | GAccAccGGGAAAucGAGGTsT | 331 | CCUCGAUUUCCCGGUGGUCTsT | 332 | AD- |
| | | | | | 9659 |
| 866-884 | ACCACCGGGAAAUCGAGGGTsT | 333 | CCCUCGAUUUCCCGGUGGUTsT | 334 | AD- |
| | | | | | 9612 |
| 866-884 | AccAccGGGAAAucGAGGGTsT | 335 | CCCUCGAUUUCCCGGUGGUTsT | 336 | AD- |
| | | | | | 9738 |
| 867-885 | CCACCGGGAAAUCGAGGGCTsT | 337 | GCCCUCGAUUUCCCGGUGGTsT | 338 | AD- |
| | | | | | 9557 |
| 867-885 | ccAccGGGAAAucGAGGGcTsT | 339 | GCCCUCGAUUUCCCGGUGGTsT | 340 | AD- |
| | | | | | 9683 |
| 875-893 | AAAUCGAGGGCAGGGUCAUTsT | 341 | AUGACCCUGCCCUCGAUUUTsT | 342 | AD- |
| | | | | | 9531 |
| 875-893 | AAAucGAGGGcAGGGucAuTsT | 343 | AUGACCCUGCCCUCGAUUUTsT | 344 | AD- |
| | | | | | 9657 |
| 875-893 | AfaAfuCfgAfgGfgCfaGfgGfuCfaU | 345 | p- | 346 | AD- |
| | fTsT | | aUfgAfcCfcUfgCfcCfuCfgAfuUfuTsT | | 14673 |
| 875-893 | AAAUfCfGAGGGCfAGGGUfCfAUfTsT | 347 | AUfGACfCfCfUfGCfCfCfUfCfGAUfUfU | 348 | AD- |
| | | | fTsT | | 14683 |
| 875-893 | AaAuCgAgGgCaGgGuCaUTsT | 349 | p- | 350 | AD- |
| | | | aUfgAfcCfcUfgCfcCfuCfgAfuUfuTsT | | 14693 |
| 875-893 | AaAuCgAgGgCaGgGuCaUTsT | 351 | AUfGACfCfCfUfGCfCfCfUfCfGAUfUfU | 352 | AD- |
| | | | fTsT | | 14703 |
| 875-893 | AfaAfuCfgAfgGfgCfaGfgGfuCfaU | 353 | AUGACccUGccCUCGAuuuTsT | 354 | AD- |
| | fTsT | | | | 14713 |
| 875-893 | AAAUfCfGAGGGCfAGGGUfCfAUfTsT | 355 | AUGACccUGccCUCGAuuuTsT | 356 | AD- |
| | | | | | 14723 |
| 875-893 | AaAuCgAgGgCaGgGuCaUTsT | 357 | AUGACccUGccCUCGAuuuTsT | 358 | AD- |
| | | | | | 14733 |
| 875-893 | CfgGfcAfcCfcUfcAfuAfgGfcCfuG | 359 | p- | 360 | AD- |
| | fTsT | | cAfgGfcCfuAfuGfaGfgGfuGfcCfgTsT | | 15079 |
| 875-893 | CfGGCfACfCfCfUfCfAUfAGGCfCfU | 361 | CfAGGCfCfUfAUfGAGGGUfGCfCfGTsT | 362 | AD- |
| | fGTsT | | | | 15089 |
| 875-893 | CgGcAcCcUcAuAgGcCuGTsT | 363 | p- | 364 | AD- |
| | | | cAfgGfcCfuAfuGfaGfgGfuGfcCfgTsT | | 15099 |
| 875-893 | CgGcAcCcUcAuAgGcCuGTsT | 365 | CfAGGCfCfUfAUfGAGGGUfGCfCfGTsT | 366 | AD- |
| | | | | | 15109 |
| 875-893 | CfgGfcAfcCfcUfcAfuAfgGfcCfuG | 367 | CAGGCcuAUgaGGGUGccgTsT | 368 | AD- |
| | fTsT | | | | 15119 |
| 875-893 | CfGGCfACfCfCfUfCfAUfAGGCfCfU | 369 | CAGGCcuAUgaGGGUGccgTsT | 370 | AD- |
| | fGTsT | | | | 15129 |
| 875-893 | CgGcAcCcUcAuAgGcCuGTsT | 371 | CAGGCcuAUgaGGGUGccgTsT | 372 | AD- |
| | | | | | 15139 |
| 877-895 | AUCGAGGGCAGGGUCAUGGTsT | 373 | CCAUGACCCUGCCCUCGAUTsT | 374 | AD- |
| | | | | | 9542 |
| 877-895 | AucGAGGGcAGGGucAuGGTsT | 375 | CcAUGACCCUGCCCUCGAUTsT | 376 | AD- |
| | | | | | 9668 |
| 878-896 | cGAGGGcAGGGucAuGGucTsT | 377 | GACcAUGACCCUGCCCUCGTsT | 378 | AD- |
| | | | | | 9739 |
| 880-898 | GAGGGCAGGGUCAUGGUCATsT | 379 | UGACCAUGACCCUGCCCUCTsT | 380 | AD- |
| | | | | | 9637 |
| 880-898 | GAGGGcAGGGucAuGGucATsT | 381 | UGACcAUGACCCUGCCCUCTsT | 382 | AD- |
| | | | | | 9763 |
| 882-900 | GGGCAGGGUCAUGGUCACCTsT | 383 | GGUGACCAUGACCCUGCCCTsT | 384 | AD- |
| | | | | | 9630 |
| 882-900 | GGGcAGGGucAuGGucAccTsT | 385 | GGUGACcAUGACCCUGCCCTsT | 386 | AD- |
| | | | | | 9756 |
| 885-903 | CAGGGUCAUGGUCACCGACTsT | 387 | GUCGGUGACCAUGACCCUGTsT | 388 | AD- |
| | | | | | 9593 |
| 885-903 | cAGGGucAuGGucAccGAcTsT | 389 | GUCGGUGACcAUGACCCUGTsT | 390 | AD- |
| | | | | | 9719 |
| 886-904 | AGGGUCAUGGUCACCGACUTsT | 391 | AGUCGGUGACCAUGACCCUTsT | 392 | AD- |
| | | | | | 9601 |
| 886-904 | AGGGucAuGGucAccGAcuTsT | 393 | AGUCGGUGACcAUGACCCUTsT | 394 | AD- |
| | | | | | 9727 |
| 892-910 | AUGGUCACCGACUUCGAGATsT | 395 | UCUCGAAGUCGGUGACCAUTsT | 396 | AD- |
| | | | | | 9573 |
| 892-910 | AuGGucAccGAcuucGAGATsT | 397 | UCUCGAAGUCGGUGACcAUTsT | 398 | AD- |
| | | | | | 9699 |
| 899-917 | CCGACUUCGAGAAUGUGCCTT | 399 | GGCACAUUCUCGAAGUCGGTT | 400 | AD- |
| | | | | | 15228 |
| 921-939 | GGAGGACGGGACCCGCUUCTT | 401 | GAAGCGGGUCCCGUCCUCCTT | 402 | AD- |
| | | | | | 15395 |
| 993-1011 | CAGCGGCCGGGAUGCCGGCTsT | 403 | GCCGGCAUCCCGGCCGCUGTsT | 404 | AD |
| | | | | | 9602 |
| 993-1011 | cAGcGGccGGGAuGccGGcTsT | 405 | GCCGGcAUCCCGGCCGCUGTsT | 406 | AD- |
| | | | | | 9728 |
| 1020-1038 | GGGUGCCAGCAUGCGCAGCTT | 407 | GCUGCGCAUGCUGGCACCCTT | 408 | AD- |
| | | | | | 15386 |
| 1038-1056 | CCUGCGCGUGCUCAACUGCTsT | 409 | GCAGUUGAGCACGCGCAGGTsT | 410 | AD- |
| | | | | | 9580 |
| 1038-1056 | ccuGcGcGuGcucAAcuGcTsT | 411 | GcAGUUGAGcACGCGcAGGTsT | 412 | AD- |
| | | | | | 9706 |
| 1040-1058 | UGCGCGUGCUCAACUGCCATsT | 413 | UGGCAGUUGAGCACGCGCATsT | 414 | AD- |
| | | | | | 9581 |
| 1040-1058 | uGcGcGuGcucAAcuGccATsT | 415 | UGGcAGUUGAGcACGCGcATsT | 416 | AD- |
| | | | | | 9707 |
| 1042-1060 | CGCGUGCUCAACUGCCAAGTsT | 417 | CUUGGCAGUUGAGCACGCGTsT | 418 | AD- |
| | | | | | 9543 |
| 1042-1060 | cGcGuGcucAAcuGccAAGTsT | 419 | CUUGGcAGUUGAGcACGCGTsT | 420 | AD- |
| | | | | | 9669 |
| 1053-1071 | CUGCCAAGGGAAGGGCACGTsT | 421 | CGUGCCCUUCCCUUGGCAGTsT | 422 | AD- |
| | | | | | 9574 |
| 1053-1071 | cuGccAAGGGAAGGGcAcGTsT | 423 | CGUGCCCUUCCCUUGGcAGTsT | 424 | AD- |
| | | | | | 9700 |
| 1057-1075 | CAAGGGAAGGGCACGGUUATT | 425 | UAACCGUGCCCUUCCCUUGTT | 426 | AD- |
| | | | | | 15320 |
| 1058-1076 | AAGGGAAGGGCACGGUUAGTT | 427 | CUAACCGUGCCCUUCCCUUTT | 428 | AD- |
| | | | | | 15321 |
| 1059-1077 | AGGGAAGGGCACGGUUAGCTT | 429 | GCUAACCGUGCCCUUCCCUTT | 430 | AD- |
| | | | | | 15199 |
| 1060-1078 | GGGAAGGGCACGGUUAGCGTT | 431 | CGCUAACCGUGCCCUUCCCTT | 432 | AD- |
| | | | | | 15167 |
| 1061-1079 | GGAAGGGCACGGUUAGCGGTT | 433 | CCGCUAACCGUGCCCUUCCTT | 434 | AD- |
| | | | | | 15164 |
| 1062-1080 | GAAGGGCACGGUUAGCGGCTT | 435 | GCCGCUAACCGUGCCCUUCTT | 436 | AD- |
| | | | | | 15166 |
| 1063-1081 | AAGGGCACGGUUAGCGGCATT | 437 | UGCCGCUAACCGUGCCCUUTT | 438 | AD- |
| | | | | | 15322 |
| 1064-1082 | AGGGCACGGUUAGCGGCACTT | 439 | GUGCCGCUAACCGUGCCCUTT | 440 | AD- |
| | | | | | 15200 |
| 1068-1086 | CACGGUUAGCGGCACCCUCTT | 441 | GAGGGUGCCGCUAACCGUGTT | 442 | AD |
| | | | | | 15213 |
| 1069-1087 | ACGGUUAGCGGCACCCUCATT | 443 | UGAGGGUGCCGCUAACCGUTT | 444 | AD |
| | | | | | 15229 |
| 1072-1090 | GUUAGCGGCACCCUCAUAGTT | 445 | CUAUGAGGGUGCCGCUAACTT | 446 | AD- |
| | | | | | 15215 |
| 1073-1091 | UUAGCGGCACCCUCAUAGGTT | 447 | CCUAUGAGGGUGCCGCUAATT | 448 | AD- |
| | | | | | 15214 |
| 1076-1094 | GCGGCACCCUCAUAGGCCUTsT | 449 | AGGCCUAUGAGGGUGCCGCTsT | 450 | AD- |
| | | | | | 9315 |
| 1079-1097 | GCACCCUCAUAGGCCUGGATsT | 451 | UCCAGGCCUAUGAGGGUGCTsT | 452 | AD- |
| | | | | | 9326 |
| 1085-1103 | UCAUAGGCCUGGAGUUUAUTsT | 453 | AUAAACUCCAGGCCUAUGATsT | 454 | AD- |
| | | | | | 9318 |
| 1090-1108 | GGCCUGGAGUUUAUUCGGATsT | 455 | UCCGAAUAAACUCCAGGCCTsT | 456 | AD- |
| | | | | | 9323 |
| 1091-1109 | GCCUGGAGUUUAUUCGGAATsT | 457 | UUCCGAAUAAACUCCAGGCTsT | 458 | AD |
| | | | | | 9314 |
| 1091-1109 | GccuGGAGuuuAuucGGAATsT | 459 | UUCCGAAuAAACUCcAGGCTsT | 460 | AD- |
| | | | | | 10792 |
| 1091-1109 | GccuGGAGuuuAuucGGAATsT | 461 | UUCCGAAUAACUCCAGGCTsT | 462 | AD- |
| | | | | | 10796 |
| 1093-1111 | CUGGAGUUUAUUCGGAAAATsT | 463 | UUUUCCGAAUAAACUCCAGTsT | 464 | AD- |
| | | | | | 9638 |
| 1093-1111 | cuGGAGuuuAuucGGAAAATsT | 465 | UUUUCCGAAuAAACUCcAGTsT | 466 | AD- |
| | | | | | 9764 |
| 1095-1113 | GGAGUUUAUUCGGAAAAGCTsT | 467 | GCUUUUCCGAAUAAACUCCTsT | 468 | AD- |
| | | | | | 9525 |
| 1095-1113 | GGAGuuuAuucGGAAAAGcTsT | 469 | GCUUUUCCGAAuAAACUCCTsT | 470 | AD- |
| | | | | | 9651 |
| 1096-1114 | GAGUUUAUUCGGAAAAGCCTsT | 471 | GGCUUUUCCGAAUAAACUCTsT | 472 | AD- |
| | | | | | 9560 |
| 1096-1114 | GAGuuuAuucGGAAAAGccTsT | 473 | GGCUUUUCCGAAuAAACUCTsT | 474 | AD- |
| | | | | | 9686 |
| 1100-1118 | UUAUUCGGAAAAGCCAGCUTsT | 475 | AGCUGGCUUUUCCGAAUAATsT | 476 | AD- |
| | | | | | 9536 |
| 1100-1118 | uuAuucGGAAAAGccAGcuTsT | 477 | AGCUGGCUUUUCCGAAuAATsT | 478 | AD- |
| | | | | | 9662 |
| 1154-1172 | CCCUGGCGGGUGGGUACAGTsT | 479 | CUGUACCCACCCGCCAGGGTsT | 480 | AD- |
| | | | | | 9584 |
| 1154-1172 | cccuGGcGGGuGGGuAcAGTsT | 481 | CUGuACCcACCCGCcAGGGTsT | 482 | AD- |
| | | | | | 9710 |
| 1155-1173 | CCUGGCGGGUGGGUACAGCTT | 483 | GCUGUACCCACCCGCCAGGTT | 484 | AD- |
| | | | | | 15323 |
| 1157-1175 | UGGCGGGUGGGUACAGCCGTsT | 485 | CGGCUGUACCCACCCGCCATsT | 486 | AD- |
| | | | | | 9551 |
| 1157-1175 | uGGcGGGuGGGuAcAGccGTsT | 487 | CGGCUGuACCcACCCGCcATsT | 488 | AD- |
| | | | | | 9677 |
| 1158-1176 | GGCGGGUGGGUACAGCCGCTT | 489 | GCGGCUGUACCCACCCGCCTT | 490 | AD- |
| | | | | | 15230 |
| 1162-1180 | GGUGGGUACAGCCGCGUCCTT | 491 | GGACGCGGCUGUACCCACCTT | 492 | AD- |
| | | | | | 15231 |
| 1164-1182 | UGGGUACAGCCGCGUCCUCTT | 493 | GAGGACGCGGCUGUACCCATT | 494 | AD- |
| | | | | | 15285 |
| 1172-1190 | GCCGCGUCCUCAACGCCGCTT | 495 | GCGGCGUUGAGGACGCGGCTT | 496 | AD- |
| | | | | | 15396 |
| 1173-1191 | CCGCGUCCUCAACGCCGCCTT | 497 | GGCGGCGUUGAGGACGCGGTT | 498 | AD- |
| | | | | | 15397 |
| 1216-1234 | GUCGUGCUGGUCACCGCUGTsT | 499 | CAGCGGUGACCAGCACGACTsT | 500 | AD- |
| | | | | | 9600 |
| 1216-1234 | GucGuGcuGGucAccGcuGTsT | 501 | cAGCGGUGACcAGcACGACTsT | 502 | AD- |
| | | | | | 9726 |
| 1217-1235 | UCGUGCUGGUCACCGCUGCTsT | 503 | GCAGCGGUGACCAGCACGATsT | 504 | AD- |
| | | | | | 9606 |
| 1217-1235 | ucGuGcuGGucAccGcuGcTsT | 505 | GcAGCGGUGACcAGcACGATsT | 506 | AD- |
| | | | | | 9732 |
| 1223-1241 | UGGUCACCGCUGCCGGCAATsT | 507 | UUGCCGGCAGCGGUGACCATsT | 508 | AD- |
| | | | | | 9633 |
| 1223-1241 | uGGucAccGcuGccGGcAATsT | 509 | UUGCCGGcAGCGGUGACcATsT | 510 | AD- |
| | | | | | 9759 |
| 1224-1242 | GGUCACCGCUGCCGGCAACTsT | 511 | GUUGCCGGCAGCGGUGACCTsT | 512 | AD- |
| | | | | | 9588 |
| 1224-1242 | GGucAccGcuGccGGcAAcTsT | 513 | GUUGCCGGcAGCGGUGACCTsT | 514 | AD- |
| | | | | | 9714 |
| 1227-1245 | CACCGCUGCCGGCAACUUCTsT | 515 | GAAGUUGCCGGCAGCGGUGTsT | 516 | AD- |
| | | | | | 9589 |
| 1227-1245 | cAccGcuGccGGcAAcuucTsT | 517 | GAAGUUGCCGGcAGCGGUGTsT | 518 | AD- |
| | | | | | 9715 |
| 1229-1247 | CCGCUGCCGGCAACUUCCGTsT | 519 | CGGAAGUUGCCGGCAGCGGTsT | 520 | AD- |
| | | | | | 9575 |
| 1229-1247 | ccGcuGccGGcAAcuuccGTsT | 521 | CGGAAGUUGCCGGcAGCGGTsT | 522 | AD- |
| | | | | | 9701 |
| 1230-1248 | CGCUGCCGGCAACUUCCGGTsT | 523 | CCGGAAGUUGCCGGCAGCGTsT | 524 | AD- |
| | | | | | 9563 |
| 1230-1248 | cGcuGccGGcAAcuuccGGTsT | 525 | CCGGAAGUUGCCGGcAGCGTsT | 526 | AD- |
| | | | | | 9689 |
| 1231-1249 | GCUGCCGGCAACUUCCGGGTsT | 527 | CCCGGAAGUUGCCGGCAGCTsT | 528 | AD- |
| | | | | | 9594 |
| 1231-1249 | GcuGccGGcAAcuuccGGGTsT | 529 | CCCGGAAGUUGCCGGcAGCTsT | 530 | AD- |
| | | | | | 9720 |
| 1236-1254 | CGGCAACUUCCGGGACGAUTsT | 531 | AUCGUCCCGGAAGUUGCCGTsT | 532 | AD- |
| | | | | | 9585 |
| 1236-1254 | cGGcAAcuuccGGGAcGAuTsT | 533 | AUCGUCCCGGAAGUUGCCGTsT | 534 | AD- |
| | | | | | 9711 |
| 1237-1255 | GGCAACUUCCGGGACGAUGTsT | 535 | CAUCGUCCCGGAAGUUGCCTsT | 536 | AD- |
| | | | | | 9614 |
| 1237-1255 | GGcAAcuuccGGGAcGAuGTsT | 537 | cAUCGUCCCGGAAGUUGCCTsT | 538 | AD- |
| | | | | | 9740 |
| 1243-1261 | UUCCGGGACGAUGCCUGCCTsT | 539 | GGCAGGCAUCGUCCCGGAATsT | 540 | AD- |
| | | | | | 9615 |
| 1243-1261 | uuccGGGAcGAuGccuGccTsT | 541 | GGcAGGcAUCGUCCCGGAATsT | 542 | AD- |
| | | | | | 9741 |
| 1248-1266 | GGACGAUGCCUGCCUCUACTsT | 543 | GUAGAGGCAGGCAUCGUCCTsT | 544 | AD- |
| | | | | | 9534 |
| 1248-1266 | GGACGAUGCCUGCCUCUACTsT | 545 | GUAGAGGCAGGCAUCGUCCTsT | 546 | AD- |
| | | | | | 9534 |
| 1248-1266 | GGAcGAuGccuGccucuAcTsT | 547 | GuAGAGGcAGGcAUCGUCCTsT | 548 | AD- |
| | | | | | 9660 |
| 1279-1297 | GCUCCCGAGGUCAUCACAGTT | 549 | CUGUGAUGACCUCGGGAGCTT | 550 | AD- |
| | | | | | 15324 |
| 1280-1298 | CUCCCGAGGUCAUCACAGUTT | 551 | ACUGUGAUGACCUCGGGAGTT | 552 | AD- |
| | | | | | 15232 |
| 1281-1299 | UCCCGAGGUCAUCACAGUUTT | 553 | AACUGUGAUGACCUCGGGATT | 553 | AD- |
| | | | | | 15233 |
| 1314-1332 | CCAAGACCAGCCGGUGACCTT | 555 | GGUCACCGGCUGGUCUUGGTT | 556 | AD- |
| | | | | | 15234 |
| 1315-1333 | CAAGACCAGCCGGUGACCCTT | 557 | GGGUCACCGGCUGGUCUUGTT | 558 | AD- |
| | | | | | 15286 |
| 1348-1366 | ACCAACUUUGGCCGCUGUGTsT | 559 | CACAGCGGCCAAAGUUGGUTsT | 560 | AD- |
| | | | | | 9590 |
| 1348-1366 | AccAAcuuuGGccGcuGuGTsT | 561 | cAcAGCGGCcAAAGUUGGUTsT | 562 | AD- |
| | | | | | 9716 |
| 1350-1368 | CAACUUUGGCCGCUGUGUGTsT | 563 | CACACAGCGGCCAAAGUUGTsT | 564 | AD- |
| | | | | | 9632 |
| 1350-1368 | cAAcuuuGGccGcuGuGuGTsT | 565 | cAcAcAGCGGCcAAAGUUGTsT | 566 | AD- |
| | | | | | 9758 |
| 1360-1378 | CGCUGUGUGGACCUCUUUGTsT | 567 | CAAAGAGGUCCACACAGCGTsT | 568 | AD- |
| | | | | | 9567 |
| 1360-1378 | cGcuGuGuGGAccucuuuGTsT | 569 | cAAAGAGGUCcAcAcAGCGTsT | 570 | AD- |
| | | | | | 9693 |
| 1390-1408 | GACAUCAUUGGUGCCUCCATsT | 571 | UGGAGGCACCAAUGAUGUCTsT | 572 | AD- |
| | | | | | 9586 |
| 1390-1408 | GAcAucAuuGGuGccuccATsT | 573 | UGGAGGcACcAAUGAUGUCTsT | 574 | AD- |
| | | | | | 9712 |
| 1394-1412 | UCAUUGGUGCCUCCAGCGATsT | 575 | UCGCUGGAGGCACCAAUGATsT | 576 | AD- |
| | | | | | 9564 |
| 1394-1412 | ucAuuGGuGccuccAGcGATsT | 577 | UCGCUGGAGGcACcAAUGATsT | 578 | AD- |
| | | | | | 9690 |
| 1417-1435 | AGCACCUGCUUUGUGUCACTsT | 579 | GUGACACAAAGCAGGUGCUTsT | 580 | AD- |
| | | | | | 9616 |
| 1417-1435 | AGcAccuGcuuuGuGucAcTsT | 581 | GUGAcAcAAAGcAGGUGCUTsT | 582 | AD- |
| | | | | | 9742 |
| 1433-1451 | CACAGAGUGGGACAUCACATT | 583 | UGUGAUGUCCCACUCUGUGTT | 584 | AD- |
| | | | | | 15398 |
| 1486-1504 | AUGCUGUCUGCCGAGCCGGTsT | 585 | CCGGCUCGGCAGACAGCAUTsT | 586 | AD- |
| | | | | | 9617 |
| 1486-1504 | AuGcuGucuGccGAGccGGTsT | 587 | CCGGCUCGGcAGAcAGcAUTsT | 588 | AD- |
| | | | | | 9743 |
| 1491-1509 | GUCUGCCGAGCCGGAGCUCTsT | 589 | GAGCUCCGGCUCGGCAGACTsT | 590 | AD- |
| | | | | | 9635 |
| 1491-1509 | GucuGccGAGccGGAGcucTsT | 591 | GAGCUCCGGCUCGGcAGACTsT | 592 | AD- |
| | | | | | 9761 |
| 1521-1539 | GUUGAGGCAGAGACUGAUCTsT | 593 | GAUCAGUCUCUGCCUCAACTsT | 594 | AD- |
| | | | | | 9568 |
| 1521-1539 | GuuGAGGcAGAGAcuGAucTsT | 595 | GAUcAGUCUCUGCCUcAACTsT | 596 | AD- |
| | | | | | 9694 |
| 1527-1545 | GCAGAGACUGAUCCACUUCTsT | 597 | GAAGUGGAUCAGUCUCUGCTsT | 598 | AD- |
| | | | | | 9576 |
| 1527-1545 | GcAGAGAcuGAuccAcuucTsT | 599 | GAAGUGGAUcAGUCUCUGCTsT | 600 | AD- |
| | | | | | 9702 |
| 1529-1547 | AGAGACUGAUCCACUUCUCTsT | 601 | GAGAAGUGGAUCAGUCUCUTsT | 602 | AD- |
| | | | | | 9627 |
| 1529-1547 | AGAGAcuGAuccAcuucucTsT | 603 | GAGAAGUGGAUcAGUCUCUTsT | 604 | AD- |
| | | | | | 9753 |
| 1543-1561 | UUCUCUGCCAAAGAUGUCATsT | 605 | UGACAUCUUUGGCAGAGAATsT | 606 | AD- |
| | | | | | 9628 |
| 1543-1561 | uucucuGccAAAGAuGucATsT | 607 | UGAcAUCUUUGGcAGAGAATsT | 608 | AD- |
| | | | | | 9754 |
| 1545-1563 | CUCUGCCAAAGAUGUCAUCTsT | 609 | GAUGACAUCUUUGGCAGAGTsT | 610 | AD- |
| | | | | | 9631 |
| 1545-1563 | cucuGccAAAGAuGucAucTsT | 611 | GAUGAcAUCUUUGGcAGAGTsT | 612 | AD- |
| | | | | | 9757 |
| 1580-1598 | CUGAGGACCAGCGGGUACUTsT | 613 | AGUACCCGCUGGUCCUCAGTsT | 614 | AD- |
| | | | | | 9595 |
| 1580-1598 | cuGAGGAccAGcGGGuAcuTsT | 615 | AGuACCCGCUGGUCCUcAGTsT | 616 | AD- |
| | | | | | 9721 |
| 1581-1599 | UGAGGACCAGCGGGUACUGTsT | 617 | CAGUACCCGCUGGUCCUCATsT | 618 | AD- |
| | | | | | 9544 |
| 1581-1599 | uGAGGAccAGcGGGuAcuGTsT | 619 | cAGuACCCGCUGGUCCUcATsT | 620 | AD- |
| | | | | | 9670 |
| 1666-1684 | ACUGUAUGGUCAGCACACUTT | 621 | AGUGUGCUGACCAUACAGUTT | 622 | AD- |
| | | | | | 15235 |
| 1668-1686 | UGUAUGGUCAGCACACUCGTT | 623 | CGAGUGUGCUGACCAUACATT | 624 | AD- |
| | | | | | 15236 |
| 1669-1687 | GUAUGGUCAGCACACUCGGTT | 625 | CCGAGUGUGCUGACCAUACTT | 626 | AD- |
| | | | | | 15168 |
| 1697-1715 | GGAUGGCCACAGCCGUCGCTT | 627 | GCGACGGCUGUGGCCAUCCTT | 628 | AD- |
| | | | | | 15174 |
| 1698-1716 | GAUGGCCACAGCCGUCGCCTT | 629 | GGCGACGGCUGUGGCCAUCTT | 630 | AD- |
| | | | | | 15325 |
| 1806-1824 | CAAGCUGGUCUGCCGGGCCTT | 631 | GGCCCGGCAGACCAGCUUGTT | 632 | AD- |
| | | | | | 15326 |
| 1815-1833 | CUGCCGGGCCCACAACGCUTsT | 633 | AGCGUUGUGGGCCCGGCAGTsT | 634 | AD- |
| | | | | | 9570 |
| 1815-1833 | cuGccGGGcccAcAAcGcuTsT | 635 | AGCGUUGUGGGCCCGGcAGTsT | 636 | AD- |
| | | | | | 9696 |
| 1816-1834 | UGCCGGGCCCACAACGCUUTsT | 637 | AAGCGUUGUGGGCCCGGCATsT | 638 | AD- |
| | | | | | 9566 |
| 1816-1834 | uGccGGGcccAcAAcGcuuTsT | 639 | AAGCGUUGUGGGCCCGGcATsT | 640 | AD- |
| | | | | | 9692 |
| 1818-1836 | CCGGGCCCACAACGCUUUUTsT | 641 | AAAAGCGUUGUGGGCCCGGTsT | 642 | AD- |
| | | | | | 9532 |
| 1818-1836 | ccGGGcccAcAAcGcuuuuTsT | 643 | AAAAGCGUUGUGGGCCCGGTsT | 644 | AD- |
| | | | | | 9658 |
| 1820-1838 | GGGCCCACAACGCUUUUGGTsT | 645 | CCAAAAGCGUUGUGGGCCCTsT | 646 | AD- |
| | | | | | 9549 |
| 1820-1838 | GGGcccAcAAcGcuuuuGGTsT | 647 | CcAAAAGCGUUGUGGGCCCTsT | 648 | AD- |
| | | | | | 9675 |
| 1840-1858 | GGUGAGGGUGUCUACGCCATsT | 649 | UGGCGUAGACACCCUCACCTsT | 650 | AD- |
| | | | | | 9541 |
| 1840-1858 | GGuGAGGGuGucuAcGccATsT | 651 | UGGCGuAGAcACCCUcACCTsT | 652 | AD- |
| | | | | | 9667 |
| 1843-1861 | GAGGGUGUCUACGCCAUUGTsT | 653 | CAAUGGCGUAGACACCCUCTsT | 654 | AD- |
| | | | | | 9550 |
| 1843-1861 | GAGGGuGucuAcGccAuuGTsT | 655 | cAAUGGCGuAGAcACCCUCTsT | 656 | AD- |
| | | | | | 9676 |
| 1861-1879 | GCCAGGUGCUGCCUGCUACTsT | 657 | GUAGCAGGCAGCACCUGGCTsT | 658 | AD- |
| | | | | | 9571 |
| 1861-1879 | GccAGGuGcuGccuGcuAcTsT | 659 | GuAGcAGGcAGcACCUGGCTsT | 660 | AD- |
| | | | | | 9697 |
| 1862-1880 | CCAGGUGCUGCCUGCUACCTsT | 661 | GGUAGCAGGCAGCACCUGGTsT | 662 | AD- |
| | | | | | 9572 |
| 1862-1880 | ccAGGuGcuGccuGcuAccTsT | 663 | GGuAGcAGGcAGcACCUGGTsT | 664 | AD- |
| | | | | | 9698 |
| 2008-2026 | ACCCACAAGCCGCCUGUGCTT | 665 | GCACAGGCGGCUUGUGGGUTT | 666 | AD- |
| | | | | | 15327 |
| 2023-2041 | GUGCUGAGGCCACGAGGUCTsT | 667 | GACCUCGUGGCCUCAGCACTsT | 668 | AD- |
| | | | | | 9639 |
| 2023-2041 | GuGcuGAGGccAcGAGGucTsT | 669 | GACCUCGUGGCCUcAGcACTsT | 670 | AD- |
| | | | | | 9765 |
| 2024-2042 | UGCUGAGGCCACGAGGUCATsT | 671 | UGACCUCGUGGCCUCAGCATsT | 672 | AD- |
| | | | | | 9518 |
| 2024-2042 | UGCUGAGGCCACGAGGUCATsT | 673 | UGACCUCGUGGCCUCAGCATsT | 674 | AD- |
| | | | | | 9518 |
| 2024-2042 | uGcuGAGGccAcGAGGucATsT | 675 | UGACCUCGUGGCCUcAGcATsT | 676 | AD- |
| | | | | | 9644 |
| 2024-2042 | UfgCfuGfaGfgCfcAfcGfaGfgUfcA | 677 | p- | 678 | AD- |
| | fTsT | | uGfaCfcUfcGfuGfgCfcUfcAfgCfaTsT | | 14672 |
| 2024-2042 | UfGCfUfGAGGCfCfACfGAGGUfCfAT | 679 | UfGACfCfUfCfGUfGGCfCfUfCfAGCfAT | 680 | AD- |
| | sT | | sT | | 14682 |
| 2024-2042 | UgCuGaGgCcAcGaGgUcATsT | 681 | p- | 682 | AD- |
| | | | uGfaCfcUfcGfuGfgCfcUfcAfgCfaTsT | | 14692 |
| 2024-2042 | UgCuGaGgCcAcGaGgUcATsT | 683 | UfGACfCfUfCfGUfGGCfCfUfCfAGCfAT | 684 | AD- |
| | | | sT | | 14702 |
| 2024-2042 | UfgCfuGfaGfgCfcAfcGfaGfgUfcA | 685 | UGACCucGUggCCUCAgcaTsT | 686 | AD- |
| | fTsT | | | | 14712 |
| 2024-2042 | UfGCfUfGAGGCfCfACfGAGGUfCfAT | 687 | UGACCucGUggCCUCAgcaTsT | 688 | AD- |
| | sT | | | | 14722 |
| 2024-2042 | UgCuGaGgCcAcGaGgUcATsT | 689 | UGACCucGUggCCUCAgcaTsT | 690 | AD- |
| | | | | | 14732 |
| 2024-2042 | GfuGfgUfcAfgCfgGfcCfgGfgAfuG | 691 | p- | 692 | AD- |
| | fTsT | | cAfuCfcCfgGfcCfgCfuGfaCfcAfcTsT | | 15078 |
| 2024-2042 | GUfGGUfCfAGCfGGCfCfGGGAUfGTsT | 693 | CfAUfCfCfCfGGCfCfGCfUfGACfCfACf | 694 | AD- |
| | | | TsT | | 15088 |
| 2024-2042 | GuGgUcAgCgGcCgGgAuGTsT | 695 | p- | 696 | AD- |
| | | | cAfuCfcCfgGfcCfgCfuGfaCfcAfcTsT | | 15098 |
| 2024-2042 | GuGgUcAgCgGcCgGgAuGTsT | 697 | CfAUfCfCfCfGGCfCfGCfUfGACfCfACf | 698 | AD- |
| | | | TsT | | 15108 |
| 2024-2042 | GfuGfgUfcAfgCfgGfcCfgGfgAfuG | 699 | CAUCCcgGCcgCUGACcacTsT | 700 | AD- |
| | fTsT | | | | 15118 |
| 2024-2042 | GUfGGUfCfAGCfGGCfCfGGGAUfGTsT | 701 | CAUCCcgGCcgCUGACcacTsT | 702 | AD- |
| | | | | | 15128 |
| 2024-2042 | GuGgUcAgCgGcCgGgAuGTsT | 703 | CAUCCcgGCcgCUGACcacTsT | 704 | AD- |
| | | | | | 15138 |
| 2030-2048 | GGCCACGAGGUCAGCCCAATT | 705 | UUGGGCUGACCUCGUGGCCTT | 706 | AD- |
| | | | | | 15237 |
| 2035-2053 | CGAGGUCAGCCCAACCAGUTT | 707 | ACUGGUUGGGCUGACCUCGTT | 708 | AD- |
| | | | | | 15287 |
| 2039-2057 | GUCAGCCCAACCAGUGCGUTT | 709 | ACGCACUGGUUGGGCUGACTT | 710 | AD- |
| | | | | | 15238 |
| 2041-2059 | CAGCCCAACCAGUGCGUGGTT | 711 | CCACGCACUGGUUGGGCUGTT | 712 | AD- |
| | | | | | 15328 |
| 2062-2080 | CACAGGGAGGCCAGCAUCCTT | 713 | GGAUGCUGGCCUCCCUGUGTT | 714 | AD- |
| | | | | | 15399 |
| 2072-2090 | CCAGCAUCCACGCUUCCUGTsT | 715 | CAGGAAGCGUGGAUGCUGGTsT | 716 | AD- |
| | | | | | 9582 |
| 2072-2090 | ccAGcAuccAcGcuuccuGTsT | 717 | cAGGAAGCGUGGAUGCUGGTsT | 718 | AD- |
| | | | | | 9708 |
| 2118-2136 | AGUCAAGGAGCAUGGAAUCTsT | 719 | GAUUCCAUGCUCCUUGACUTsT | 720 | AD- |
| | | | | | 9545 |
| 2118-2136 | AGucAAGGAGcAuGGAAucTsT | 721 | GAUUCcAUGCUCCUUGACUTsT | 722 | AD- |
| | | | | | 9671 |
| 2118-2136 | AfgUfcAfaGfgAfgCfaUfgGfaAfuC | 723 | p- | 724 | AD- |
| | fTsT | | gAfuUfcCfaUfgCfuCfcUfuGfaCfuTsT | | 14674 |
| 2118-2136 | AGUfCfAAGGAGCfAUfGGAAUfCfTsT | 725 | GAUfUfCfCfAUfGCfUfCfCfUfUfGACfU | 726 | AD- |
| | | | fTsT | | 14684 |
| 2118-2136 | AgUcAaGgAgCaUgGaAuCTsT | 727 | p- | 728 | AD- |
| | | | gAfuUfcCfaUfgCfuCfcUfuGfaCfuTsT | | 14694 |
| 2118-2136 | AgUcAaGgAgCaUgGaAuCTsT | 729 | GAUfUfCfCfAUfGCfUfCfCfUfUfGACfU | 730 | AD- |
| | | | fTsT | | 14704 |
| 2118-2136 | AfgUfcAfaGfgAfgCfaUfgGfaAfuC | 731 | GAUUCcaUGcuCCUUGacuTsT | 732 | AD- |
| | fTsT | | | | 14714 |
| 2118-2136 | AGUfCfAAGGAGCfAUfGGAAUfCfTsT | 733 | GAUUCcaUGcuCCUUGacuTsT | 734 | AD- |
| | | | | | 14724 |
| 2118-2136 | AgUcAaGgAgCaUgGaAuCTsT | 735 | GAUUCcaUGcuCCUUGacuTsT | 736 | AD- |
| | | | | | 14734 |
| 2118-2136 | GfcGfgCfaCfcCfuCfaUfaGfgCfcU | 737 | p- | 738 | AD- |
| | fTsT | | aGfgCfcUfaUfgAfgGfgUfgCfcGfcTsT | | 15080 |
| 2118-2136 | GCfGGCfACfCfCfUfCfAUfAGGCfCf | 739 | AGGCfCfUfAUfGAGGGUfGCfCfGCfTsT | 740 | AD- |
| | UfTsT | | | | 15090 |
| 2118-2136 | GcGgCaCcCuCaUaGgCcUTsT | 741 | p- | 742 | AD- |
| | | | aGfgCfcUfaUfgAfgGfgUfgCfcGfcTsT | | 15100 |
| 2118-2136 | GcGgCaCcCuCaUaGgCcUTsT | 743 | AGGCfCfUfAUfGAGGGUfGCfCfGCfTsT | 744 | AD- |
| | | | | | 15110 |
| 2118-2136 | GfcGfgCfaCfcCfuCfaUfaGfgCfcU | 745 | AGGCCuaUGagGGUGCcgcTsT | 746 | AD- |
| | fTsT | | | | 15120 |
| 2118-2136 | GCfGGCfACfCfCfUfCfAUfAGGCfCf | 747 | AGGCCuaUGagGGUGCcgcTsT | 748 | AD- |
| | UfTsT | | | | 15130 |
| 2118-2136 | GcGgCaCcCuCaUaGgCcUTsT | 749 | AGGCCuaUGagGGUGCcgcTsT | 750 | AD- |
| | | | | | 15140 |
| 2122-2140 | AAGGAGCAUGGAAUCCCGGTsT | 751 | CCGGGAUUCCAUGCUCCUUTsT | 752 | AD- |
| | | | | | 9522 |
| 2122-2140 | AAGGAGcAuGGAAucccGGTsT | 753 | CCGGGAUUCcAUGCUCCUUTsT | 754 | AD- |
| | | | | | 9648 |
| 2123-2141 | AGGAGCAUGGAAUCCCGGCTsT | 755 | GCCGGGAUUCCAUGCUCCUTsT | 756 | AD- |
| | | | | | 9552 |
| 2123-2141 | AGGAGcAuGGAAucccGGcTsT | 757 | GCCGGGAUUCcAUGCUCCUTsT | 758 | AD- |
| | | | | | 9678 |
| 2125-2143 | GAGCAUGGAAUCCCGGCCCTsT | 759 | GGGCCGGGAUUCCAUGCUCTsT | 760 | AD- |
| | | | | | 9618 |
| 2125-2143 | GAGcAuGGAAucccGGcccTsT | 761 | GGGCCGGGAUUCcAUGCUCTsT | 762 | AD- |
| | | | | | 9744 |
| 2230-2248 | GCCUACGCCGUAGACAACATT | 763 | UGUUGUCUACGGCGUAGGCTT | 764 | AD- |
| | | | | | 15239 |
| 2231-2249 | CCUACGCCGUAGACAACACTT | 765 | GUGUUGUCUACGGCGUAGGTT | 766 | AD- |
| | | | | | 15212 |
| 2232-2250 | CUACGCCGUAGACAACACGTT | 767 | CGUGUUGUCUACGGCGUAGTT | 768 | AD- |
| | | | | | 15240 |
| 2233-2251 | UACGCCGUAGACAACACGUTT | 769 | ACGUGUUGUCUACGGCGUATT | 770 | AD- |
| | | | | | 15177 |
| 2235-2253 | CGCCGUAGACAACACGUGUTT | 771 | ACACGUGUUGUCUACGGCGTT | 772 | AD- |
| | | | | | 15179 |
| 2236-2254 | GCCGUAGACAACACGUGUGTT | 773 | CACACGUGUUGUCUACGGCTT | 774 | AD- |
| | | | | | 15180 |
| 2237-2255 | CCGUAGACAACACGUGUGUTT | 775 | ACACACGUGUUGUCUACGGTT | 776 | AD- |
| | | | | | 15241 |
| 2238-2256 | CGUAGACAACACGUGUGUATT | 777 | UACACACGUGUUGUCUACGTT | 778 | AD- |
| | | | | | 15268 |
| 2240-2258 | UAGACAACACGUGUGUAGUTT | 779 | ACUACACACGUGUUGUCUATT | 780 | AD- |
| | | | | | 15242 |
| 2241-2259 | AGACAACACGUGUGUAGUCTT | 781 | GACUACACACGUGUUGUCUTT | 782 | AD- |
| | | | | | 15216 |
| 2242-2260 | GACAACACGUGUGUAGUCATT | 783 | UGACUACACACGUGUUGUCTT | 784 | AD- |
| | | | | | 15176 |
| 2243-2261 | ACAACACGUGUGUAGUCAGTT | 785 | CUGACUACACACGUGUUGUTT | 786 | AD- |
| | | | | | 15181 |
| 2244-2262 | CAACACGUGUGUAGUCAGGTT | 787 | CCUGACUACACACGUGUUGTT | 788 | AD- |
| | | | | | 15243 |
| 2247-2265 | CACGUGUGUAGUCAGGAGCTT | 789 | GCUCCUGACUACACACGUGTT | 790 | AD- |
| | | | | | 15182 |
| 2248-2266 | ACGUGUGUAGUCAGGAGCCTT | 791 | GGCUCCUGACUACACACGUTT | 792 | AD- |
| | | | | | 15244 |
| 2249-2267 | CGUGUGUAGUCAGGAGCCGTT | 793 | CGGCUCCUGACUACACACGTT | 794 | AD- |
| | | | | | 15387 |
| 2251-2269 | UGUGUAGUCAGGAGCCGGGTT | 795 | CCCGGCUCCUGACUACACATT | 796 | AD- |
| | | | | | 15245 |
| 2257-2275 | GUCAGGAGCCGGGACGUCATsT | 797 | UGACGUCCCGGCUCCUGACTsT | 798 | AD- |
| | | | | | 9555 |
| 2257-2275 | GucAGGAGccGGGAcGucATsT | 799 | UGACGUCCCGGCUCCUGACTsT | 800 | AD- |
| | | | | | 9681 |
| 2258-2276 | UCAGGAGCCGGGACGUCAGTsT | 801 | CUGACGUCCCGGCUCCUGATsT | 802 | AD- |
| | | | | | 9619 |
| 2258-2276 | ucAGGAGccGGGAcGucAGTsT | 803 | CUGACGUCCCGGCUCCUGATsT | 804 | AD- |
| | | | | | 9745 |
| 2259-2277 | CAGGAGCCGGGACGUCAGCTsT | 805 | GCUGACGUCCCGGCUCCUGTsT | 806 | AD- |
| | | | | | 9620 |
| 2259-2277 | cAGGAGccGGGAcGucAGcTsT | 807 | GCUGACGUCCCGGCUCCUGTsT | 808 | AD- |
| | | | | | 9746 |
| 2263-2281 | AGCCGGGACGUCAGCACUATT | 809 | UAGUGCUGACGUCCCGGCUTT | 810 | AD- |
| | | | | | 15288 |
| 2265-2283 | CCGGGACGUCAGCACUACATT | 811 | UGUAGUGCUGACGUCCCGGTT | 812 | AD- |
| | | | | | 15246 |
| 2303-2321 | CCGUGACAGCCGUUGCCAUTT | 813 | AUGGCAACGGCUGUCACGGTT | 814 | AD- |
| | | | | | 15289 |
| 2317-2335 | GCCAUCUGCUGCCGGAGCCTsT | 815 | GGCUCCGGCAGCAGAUGGCTsT | 816 | AD- |
| | | | | | 9324 |
| 2375-2393 | CCCAUCCCAGGAUGGGUGUTT | 817 | ACACCCAUCCUGGGAUGGGTT | 818 | AD- |
| | | | | | 15329 |
| 2377-2395 | CAUCCCAGGAUGGGUGUCUTT | 819 | AGACACCCAUCCUGGGAUGTT | 820 | AD- |
| | | | | | 15330 |
| 2420-2438 | AGCUUUAAAAUGGUUCCGATT | 821 | UCGGAACCAUUUUAAAGCUTT | 822 | AD- |
| | | | | | 15169 |
| 2421-2439 | GCUUUAAAAUGGUUCCGACTT | 823 | GUCGGAACCAUUUUAAAGCTT | 824 | AD- |
| | | | | | 15201 |
| 2422-2440 | CUUUAAAAUGGUUCCGACUTT | 825 | AGUCGGAACCAUUUUAAAGTT | 826 | AD- |
| | | | | | 15331 |
| 2423-2441 | UUUAAAAUGGUUCCGACUUTT | 827 | AAGUCGGAACCAUUUUAAATT | 828 | AD- |
| | | | | | 15190 |
| 2424-2442 | UUAAAAUGGUUCCGACUUGTT | 829 | CAAGUCGGAACCAUUUUAATT | 830 | AD- |
| | | | | | 15247 |
| 2425-2443 | UAAAAUGGUUCCGACUUGUTT | 831 | ACAAGUCGGAACCAUUUUATT | 832 | AD- |
| | | | | | 15248 |
| 2426-2444 | AAAAUGGUUCCGACUUGUCTT | 833 | GACAAGUCGGAACCAUUUUTT | 834 | AD- |
| | | | | | 15175 |
| 2427-2445 | AAAUGGUUCCGACUUGUCCTT | 835 | GGACAAGUCGGAACCAUUUTT | 836 | AD- |
| | | | | | 15249 |
| 2428-2446 | AAUGGUUCCGACUUGUCCCTT | 837 | GGGACAAGUCGGAACCAUUTT | 838 | AD- |
| | | | | | 15250 |
| 2431-2449 | GGUUCCGACUUGUCCCUCUTT | 839 | AGAGGGACAAGUCGGAACCTT | 840 | AD- |
| | | | | | 15400 |
| 2457-2475 | CUCCAUGGCCUGGCACGAGTT | 841 | CUCGUGCCAGGCCAUGGAGTT | 842 | AD- |
| | | | | | 15332 |
| 2459-2477 | CCAUGGCCUGGCACGAGGGTT | 843 | CCCUCGUGCCAGGCCAUGGTT | 844 | AD- |
| | | | | | 15388 |
| 2545-2563 | GAACUCACUCACUCUGGGUTT | 845 | ACCCAGAGUGAGUGAGUUCTT | 846 | AD- |
| | | | | | 15333 |
| 2549-2567 | UCACUCACUCUGGGUGCCUTT | 847 | AGGCACCCAGAGUGAGUGATT | 848 | AD- |
| | | | | | 15334 |
| 2616-2634 | UUUCACCAUUCAAACAGGUTT | 849 | ACCUGUUUGAAUGGUGAAATT | 850 | AD- |
| | | | | | 15335 |
| 2622-2640 | CAUUCAAACAGGUCGAGCUTT | 851 | AGCUCGACCUGUUUGAAUGTT | 852 | AD- |
| | | | | | 15183 |
| 2623-2641 | AUUCAAACAGGUCGAGCUGTT | 853 | CAGCUCGACCUGUUUGAAUTT | 854 | AD- |
| | | | | | 15202 |
| 2624-2642 | UUCAAACAGGUCGAGCUGUTT | 855 | ACAGCUCGACCUGUUUGAATT | 856 | AD- |
| | | | | | 15203 |
| 2625-2643 | UCAAACAGGUCGAGCUGUGTT | 857 | CACAGCUCGACCUGUUUGATT | 858 | AD- |
| | | | | | 15272 |
| 2626-2644 | CAAACAGGUCGAGCUGUGCTT | 859 | GCACAGCUCGACCUGUUUGTT | 860 | AD- |
| | | | | | 15217 |
| 2627-2645 | AAACAGGUCGAGCUGUGCUTT | 861 | AGCACAGCUCGACCUGUUUTT | 862 | AD- |
| | | | | | 15290 |
| 2628-2646 | AACAGGUCGAGCUGUGCUCTT | 863 | GAGCACAGCUCGACCUGUUTT | 864 | AD- |
| | | | | | 15218 |
| 2630-2648 | CAGGUCGAGCUGUGCUCGGTT | 865 | CCGAGCACAGCUCGACCUGTT | 866 | AD- |
| | | | | | 15389 |
| 2631-2649 | AGGUCGAGCUGUGCUCGGGTT | 867 | CCCGAGCACAGCUCGACCUTT | 868 | AD- |
| | | | | | 15336 |
| 2633-2651 | GUCGAGCUGUGCUCGGGUGTT | 869 | CACCCGAGCACAGCUCGACTT | 870 | AD- |
| | | | | | 15337 |
| 2634-2652 | UCGAGCUGUGCUCGGGUGCTT | 871 | GCACCCGAGCACAGCUCGATT | 872 | AD- |
| | | | | | 15191 |
| 2657-2675 | AGCUGCUCCCAAUGUGCCGTT | 873 | CGGCACAUUGGGAGCAGCUTT | 874 | AD- |
| | | | | | 15390 |
| 2658-2676 | GCUGCUCCCAAUGUGCCGATT | 875 | UCGGCACAUUGGGAGCAGCTT | 876 | AD- |
| | | | | | 15338 |
| 2660-2678 | UGCUCCCAAUGUGCCGAUGTT | 877 | CAUCGGCACAUUGGGAGCATT | 878 | AD- |
| | | | | | 15204 |
| 2663-2681 | UCCCAAUGUGCCGAUGUCCTT | 879 | GGACAUCGGCACAUUGGGATT | 880 | AD- |
| | | | | | 15251 |
| 2665-2683 | CCAAUGUGCCGAUGUCCGUTT | 881 | ACGGACAUCGGCACAUUGGTT | 882 | AD- |
| | | | | | 15205 |
| 2666-2684 | CAAUGUGCCGAUGUCCGUGTT | 883 | CACGGACAUCGGCACAUUGTT | 884 | AD- |
| | | | | | 15171 |
| 2667-2685 | AAUGUGCCGAUGUCCGUGGTT | 885 | CCACGGACAUCGGCACAUUTT | 886 | AD- |
| | | | | | 15252 |
| 2673-2691 | CCGAUGUCCGUGGGCAGAATT | 887 | UUCUGCCCACGGACAUCGGTT | 888 | AD- |
| | | | | | 15339 |
| 2675-2693 | GAUGUCCGUGGGCAGAAUGTT | 889 | CAUUCUGCCCACGGACAUCTT | 890 | AD- |
| | | | | | 15253 |
| 2678-2696 | GUCCGUGGGCAGAAUGACUTT | 891 | AGUCAUUCUGCCCACGGACTT | 892 | AD- |
| | | | | | 15340 |
| 2679-2697 | UCCGUGGGCAGAAUGACUUTT | 893 | AAGUCAUUCUGCCCACGGATT | 894 | AD- |
| | | | | | 15291 |
| 2683-2701 | UGGGCAGAAUGACUUUUAUTT | 895 | AUAAAAGUCAUUCUGCCCATT | 896 | AD- |
| | | | | | 15341 |
| 2694-2712 | ACUUUUAUUGAGCUCUUGUTT | 897 | ACAAGAGCUCAAUAAAAGUTT | 898 | AD- |
| | | | | | 15401 |
| 2700-2718 | AUUGAGCUCUUGUUCCGUGTT | 899 | CACGGAACAAGAGCUCAAUTT | 900 | AD- |
| | | | | | 15342 |
| 2704-2722 | AGCUCUUGUUCCGUGCCAGTT | 901 | CUGGCACGGAACAAGAGCUTT | 902 | AD- |
| | | | | | 15343 |
| 2705-2723 | GCUCUUGUUCCGUGCCAGGTT | 903 | CCUGGCACGGAACAAGAGCTT | 904 | AD- |
| | | | | | 15292 |
| 2710-2728 | UGUUCCGUGCCAGGCAUUCTT | 905 | GAAUGCCUGGCACGGAACATT | 906 | AD- |
| | | | | | 15344 |
| 2711-2729 | GUUCCGUGCCAGGCAUUCATT | 907 | UGAAUGCCUGGCACGGAACTT | 908 | AD- |
| | | | | | 15254 |
| 2712-2730 | UUCCGUGCCAGGCAUUCAATT | 909 | UUGAAUGCCUGGCACGGAATT | 910 | AD- |
| | | | | | 15345 |
| 2715-2733 | CGUGCCAGGCAUUCAAUCCTT | 911 | GGAUUGAAUGCCUGGCACGTT | 912 | AD- |
| | | | | | 15206 |
| 2716-2734 | GUGCCAGGCAUUCAAUCCUTT | 913 | AGGAUUGAAUGCCUGGCACTT | 914 | AD- |
| | | | | | 15346 |
| 2728-2746 | CAAUCCUCAGGUCUCCACCTT | 915 | GGUGGAGACCUGAGGAUUGTT | 916 | AD- |
| | | | | | 15347 |
| 2743-2761 | CACCAAGGAGGCAGGAUUCTsT | 917 | GAAUCCUGCCUCCUUGGUGTsT | 918 | AD- |
| | | | | | 9577 |
| 2743-2761 | cAccAAGGAGGcAGGAuucTsT | 919 | GAAUCCUGCCUCCUUGGUGTsT | 920 | AD- |
| | | | | | 9703 |
| 2743-2761 | CfaCfcAfaGfgAfgGfcAfgGfaUfuC | 921 | p- | 922 | AD- |
| | fTsT | | gAfaUfcCfuGfcCfuCfcUfuGfgUfgTsT | | 14678 |
| 2743-2761 | CfACfCfAAGGAGGCfAGGAUfUfCfTsT | 923 | GAAUfCfCfUfGCfCfUfCfCfUfUfGGUfG | 924 | AD- |
| | | | TsT | | 14688 |
| 2743-2761 | CaCcAaGgAgGcAgGaUuCTsT | 925 | p- | 926 | AD- |
| | | | gAfaUfcCfuGfcCfuCfcUfuGfgUfgTsT | | 14698 |
| 2743-2761 | CaCcAaGgAgGcAgGaUuCTsT | 927 | GAAUfCfCfUfGCfCfUfCfCfUfUfGGUfG | 928 | AD- |
| | | | TsT | | 14708 |
| 2743-2761 | CfaCfcAfaGfgAfgGfcAfgGfaUfuC | 929 | GAAUCcuGCcuCCUUGgugTsT | 930 | AD- |
| | fTsT | | | | 14718 |
| 2743-2761 | CfACfCfAAGGAGGCfAGGAUfUfCfTsT | 931 | GAAUCcuGCcuCCUUGgugTsT | 932 | AD- |
| | | | | | 14728 |
| 2743-2761 | CaCcAaGgAgGcAgGaUuCTsT | 933 | GAAUCcuGCcuCCUUGgugTsT | 934 | AD- |
| | | | | | 14738 |
| 2743-2761 | GfgCfcUfgGfaGfuUfuAfuUfcGfgA | 935 | p- | 936 | AD- |
| | fTsT | | uCfcGfaAfuAfaAfcUfcCfaGfgCfcTsT | | 15084 |
| 2743-2761 | GGCfCfUfGGAGUfUfUfAUfUfCfGGA | 937 | UfCfCfGAAUfAAACfUfCfCfAGGCfCfTsT | 938 | AD- |
| | TsT | | | | 15094 |
| 2743-2761 | GgCcUgGaGuUuAuUcGgATsT | 939 | p- | 940 | AD- |
| | | | uCfcGfaAfuAfaAfcUfcCfaGfgCfcTsT | | 15104 |
| 2743-2761 | GgCcUgGaGuUuAuUcGgATsT | 941 | UfCfCfGAAUfAAACfUfCfCfAGGCfCfTsT | 942 | AD- |
| | | | | | 15114 |
| 2743-2761 | GfgCfcUfgGfaGfuUfuAfuUfcGfgA | 943 | UCCGAauAAacUCCAGgccTsT | 944 | AD- |
| | fTsT | | | | 15124 |
| 2743-2761 | GGCfCfUfGGAGUfUfUfAUfUfCfGGA | 945 | UCCGAauAAacUCCAGgccTsT | 946 | AD- |
| | TsT | | | | 15134 |
| 2743-2761 | GgCcUgGaGuUuAuUcGgATsT | 947 | UCCGAauAAacUCCAGgccTsT | 948 | AD- |
| | | | | | 15144 |
| 2753-2771 | GCAGGAUUCUUCCCAUGGATT | 949 | UCCAUGGGAAGAAUCCUGCTT | 950 | AD- |
| | | | | | 15391 |
| 2794-2812 | UGCAGGGACAAACAUCGUUTT | 951 | AACGAUGUUUGUCCCUGCATT | 952 | AD- |
| | | | | | 15348 |
| 2795-2813 | GCAGGGACAAACAUCGUUGTT | 953 | CAACGAUGUUUGUCCCUGCTT | 954 | AD- |
| | | | | | 15349 |
| 2797-2815 | AGGGACAAACAUCGUUGGGTT | 955 | CCCAACGAUGUUUGUCCCUTT | 956 | AD- |
| | | | | | 15170 |
| 2841-2859 | CCCUCAUCUCCAGCUAACUTT | 957 | AGUUAGCUGGAGAUGAGGGTT | 958 | AD- |
| | | | | | 15350 |
| 2845-2863 | CAUCUCCAGCUAACUGUGGTT | 959 | CCACAGUUAGCUGGAGAUGTT | 960 | AD- |
| | | | | | 15402 |
| 2878-2896 | GCUCCCUGAUUAAUGGAGGTT | 961 | CCUCCAUUAAUCAGGGAGCTT | 962 | AD- |
| | | | | | 15293 |
| 2881-2899 | CCCUGAUUAAUGGAGGCUUTT | 963 | AAGCCUCCAUUAAUCAGGGTT | 964 | AD- |
| | | | | | 15351 |
| 2882-2900 | CCUGAUUAAUGGAGGCUUATT | 965 | UAAGCCUCCAUUAAUCAGGTT | 966 | AD- |
| | | | | | 15403 |
| 2884-2902 | UGAUUAAUGGAGGCUUAGCTT | 967 | GCUAAGCCUCCAUUAAUCATT | 968 | AD- |
| | | | | | 15404 |
| 2885-2903 | GAUUAAUGGAGGCUUAGCUTT | 969 | AGCUAAGCCUCCAUUAAUCTT | 970 | AD- |
| | | | | | 15207 |
| 2886-2904 | AUUAAUGGAGGCUUAGCUUTT | 971 | AAGCUAAGCCUCCAUUAAUTT | 972 | AD- |
| | | | | | 15352 |
| 2887-2905 | UUAAUGGAGGCUUAGCUUUTT | 973 | AAAGCUAAGCCUCCAUUAATT | 974 | AD- |
| | | | | | 15255 |
| 2903-2921 | UUUCUGGAUGGCAUCUAGCTsT | 975 | GCUAGAUGCCAUCCAGAAATsT | 976 | AD- |
| | | | | | 9603 |
| 2903-2921 | uuucuGGAuGGcAucuAGcTsT | 977 | GCuAGAUGCcAUCcAGAAATsT | 978 | AD- |
| | | | | | 9729 |
| 2904-2922 | UUCUGGAUGGCAUCUAGCCTsT | 979 | GGCUAGAUGCCAUCCAGAATsT | 980 | AD- |
| | | | | | 9599 |
| 2904-2922 | uucuGGAuGGcAucuAGccTsT | 981 | GGCuAGAUGCcAUCcAGAATsT | 982 | AD- |
| | | | | | 9725 |
| 2905-2923 | UCUGGAUGGCAUCUAGCCATsT | 983 | UGGCUAGAUGCCAUCCAGATsT | 984 | AD- |
| | | | | | 9621 |
| 2905-2923 | ucuGGAuGGcAucuAGccATsT | 985 | UGGCuAGAUGCcAUCcAGATsT | 986 | AD- |
| | | | | | 9747 |
| 2925-2943 | AGGCUGGAGACAGGUGCGCTT | 987 | GCGCACCUGUCUCCAGCCUTT | 988 | AD- |
| | | | | | 15405 |
| 2926-2944 | GGCUGGAGACAGGUGCGCCTT | 989 | GGCGCACCUGUCUCCAGCCTT | 990 | AD- |
| | | | | | 15353 |
| 2927-2945 | GCUGGAGACAGGUGCGCCCTT | 991 | GGGCGCACCUGUCUCCAGCTT | 992 | AD- |
| | | | | | 15354 |
| 2972-2990 | UUCCUGAGCCACCUUUACUTT | 993 | AGUAAAGGUGGCUCAGGAATT | 994 | AD- |
| | | | | | 15406 |
| 2973-2991 | UCCUGAGCCACCUUUACUCTT | 995 | GAGUAAAGGUGGCUCAGGATT | 996 | AD- |
| | | | | | 15407 |
| 2974-2992 | CCUGAGCCACCUUUACUCUTT | 997 | AGAGUAAAGGUGGCUCAGGTT | 998 | AD- |
| | | | | | 15355 |
| 2976-2994 | UGAGCCACCUUUACUCUGCTT | 999 | GCAGAGUAAAGGUGGCUCATT | 1000 | AD- |
| | | | | | 15356 |
| 2978-2996 | AGCCACCUUUACUCUGCUCTT | 1001 | GAGCAGAGUAAAGGUGGCUTT | 1002 | AD- |
| | | | | | 15357 |
| 2981-2999 | CACCUUUACUCUGCUCUAUTT | 1003 | AUAGAGCAGAGUAAAGGUGTT | 1004 | AD- |
| | | | | | 15269 |
| 2987-3005 | UACUCUGCUCUAUGCCAGGTsT | 1005 | CCUGGCAUAGAGCAGAGUATsT | 1006 | AD- |
| | | | | | 9565 |
| 2987-3005 | uAcucuGcucuAuGccAGGTsT | 1007 | CCUGGcAuAGAGcAGAGuATsT | 1008 | AD- |
| | | | | | 9691 |
| 2998-3016 | AUGCCAGGCUGUGCUAGCATT | 1009 | UGCUAGCACAGCCUGGCAUTT | 1010 | AD- |
| | | | | | 15358 |
| 3003-3021 | AGGCUGUGCUAGCAACACCTT | 1011 | GGUGUUGCUAGCACAGCCUTT | 1012 | AD- |
| | | | | | 15359 |
| 3006-3024 | CUGUGCUAGCAACACCCAATT | 1013 | UUGGGUGUUGCUAGCACAGTT | 1014 | AD- |
| | | | | | 15360 |
| 3010-3028 | GCUAGCAACACCCAAAGGUTT | 1015 | ACCUUUGGGUGUUGCUAGCTT | 1016 | AD- |
| | | | | | 15219 |
| 3038-3056 | GGAGCCAUCACCUAGGACUTT | 1017 | AGUCCUAGGUGAUGGCUCCTT | 1018 | AD- |
| | | | | | 15361 |
| 3046-3064 | CACCUAGGACUGACUCGGCTT | 1019 | GCCGAGUCAGUCCUAGGUGTT | 1020 | AD- |
| | | | | | 15273 |
| 3051-3069 | AGGACUGACUCGGCAGUGUTT | 1021 | ACACUGCCGAGUCAGUCCUTT | 1022 | AD- |
| | | | | | 15362 |
| 3052-3070 | GGACUGACUCGGCAGUGUGTT | 1023 | CACACUGCCGAGUCAGUCCTT | 1024 | AD- |
| | | | | | 15192 |
| 3074-3092 | UGGUGCAUGCACUGUCUCATT | 1025 | UGAGACAGUGCAUGCACCATT | 1026 | AD- |
| | | | | | 15256 |
| 3080-3098 | AUGCACUGUCUCAGCCAACTT | 1027 | GUUGGCUGAGACAGUGCAUTT | 1028 | AD- |
| | | | | | 15363 |
| 3085-3103 | CUGUCUCAGCCAACCCGCUTT | 1029 | AGCGGGUUGGCUGAGACAGTT | 1030 | AD- |
| | | | | | 15364 |
| 3089-3107 | CUCAGCCAACCCGCUCCACTsT | 1031 | GUGGAGCGGGUUGGCUGAGTsT | 1032 | AD- |
| | | | | | 9604 |
| 3089-3107 | cucAGccAAcccGcuccAcTsT | 1033 | GUGGAGCGGGUUGGCUGAGTsT | 1034 | AD- |
| | | | | | 9730 |
| 3093-3111 | GCCAACCCGCUCCACUACCTsT | 1035 | GGUAGUGGAGCGGGUUGGCTsT | 1036 | AD- |
| | | | | | 9527 |
| 3093-3111 | GccAAcccGcuccAcuAccTsT | 1037 | GGuAGUGGAGCGGGUUGGCTsT | 1038 | AD- |
| | | | | | 9653 |
| 3096-3114 | AACCCGCUCCACUACCCGGTT | 1039 | CCGGGUAGUGGAGCGGGUUTT | 1040 | AD- |
| | | | | | 15365 |
| 3099-3117 | CCGCUCCACUACCCGGCAGTT | 1041 | CUGCCGGGUAGUGGAGCGGTT | 1042 | AD- |
| | | | | | 15294 |
| 3107-3125 | CUACCCGGCAGGGUACACATT | 1043 | UGUGUACCCUGCCGGGUAGTT | 1044 | AD- |
| | | | | | 15173 |
| 3108-3126 | UACCCGGCAGGGUACACAUTT | 1045 | AUGUGUACCCUGCCGGGUATT | 1046 | AD- |
| | | | | | 15366 |
| 3109-3127 | ACCCGGCAGGGUACACAUUTT | 1047 | AAUGUGUACCCUGCCGGGUTT | 1048 | AD- |
| | | | | | 15367 |
| 3110-3128 | CCCGGCAGGGUACACAUUCTT | 1049 | GAAUGUGUACCCUGCCGGGTT | 1050 | AD- |
| | | | | | 15257 |
| 3112-3130 | CGGCAGGGUACACAUUCGCTT | 1051 | GCGAAUGUGUACCCUGCCGTT | 1052 | AD- |
| | | | | | 15184 |
| 3114-3132 | GCAGGGUACACAUUCGCACTT | 1053 | GUGCGAAUGUGUACCCUGCTT | 1054 | AD- |
| | | | | | 15185 |
| 3115-3133 | CAGGGUACACAUUCGCACCTT | 1055 | GGUGCGAAUGUGUACCCUGTT | 1056 | AD- |
| | | | | | 15258 |
| 3116-3134 | AGGGUACACAUUCGCACCCTT | 1057 | GGGUGCGAAUGUGUACCCUTT | 1058 | AD- |
| | | | | | 15186 |
| 3196-3214 | GGAACUGAGCCAGAAACGCTT | 1059 | GCGUUUCUGGCUCAGUUCCTT | 1060 | AD- |
| | | | | | 15274 |
| 3197-3215 | GAACUGAGCCAGAAACGCATT | 1061 | UGCGUUUCUGGCUCAGUUCTT | 1062 | AD- |
| | | | | | 15368 |
| 3198-3216 | AACUGAGCCAGAAACGCAGTT | 1063 | CUGCGUUUCUGGCUCAGUUTT | 1064 | AD- |
| | | | | | 15369 |
| 3201-3219 | UGAGCCAGAAACGCAGAUUTT | 1065 | AAUCUGCGUUUCUGGCUCATT | 1066 | AD- |
| | | | | | 15370 |
| 3207-3225 | AGAAACGCAGAUUGGGCUGTT | 1067 | CAGCCCAAUCUGCGUUUCUTT | 1068 | AD- |
| | | | | | 15259 |
| 3210-3228 | AACGCAGAUUGGGCUGGCUTT | 1069 | AGCCAGCCCAAUCUGCGUUTT | 1070 | AD- |
| | | | | | 15408 |
| 3233-3251 | AGCCAAGCCUCUUCUUACUTsT | 1071 | AGUAAGAAGAGGCUUGGCUTsT | 1072 | AD- |
| | | | | | 9597 |
| 3233-3251 | AGccAAGccucuucuuAcuTsT | 1073 | AGuAAGAAGAGGCUUGGCUTsT | 1074 | AD- |
| | | | | | 9723 |
| 3233-3251 | AfgCfcAfaGfcCfuCfuUfcUfuAfcU | 1075 | p- | 1076 | AD- |
| | fTsT | | aGfuAfaGfaAfgAfgGfcUfuGfgCfuTsT | | 14680 |
| 3233-3251 | AGCfCfAAGCfCfUfCfUfUfCfUfUfA | 1077 | AGUfAAGAAGAGGCfUfUfGGCfUfTsT | 1078 | AD- |
| | CfUfTsT | | | | 14690 |
| 3233-3251 | AgCcAaGcCuCuUcUuAcUTsT | 1079 | p- | 1080 | AD- |
| | | | aGfuAfaGfaAfgAfgGfcUfuGfgCfuTsT | | 14700 |
| 3233-3251 | AgCcAaGcCuCuUcUuAcUTsT | 1081 | AGUfAAGAAGAGGCfUfUfGGCfUfTsT | 1082 | AD- |
| | | | | | 14710 |
| 3233-3251 | AfgCfcAfaGfcCfuCfuUfcUfuAfcU | 1082 | AGUAAgaAGagGCUUGgcuTsT | 1084 | AD- |
| | fTsT | | | | 14720 |
| 3233-3251 | AGCfCfAAGCfCfUfCfUfUfCfUfUfA | 1085 | AGUAAgaAGagGCUUGgcuTsT | 1086 | AD- |
| | CfUfTsT | | | | 14730 |
| 3233-3251 | AgCcAaGcCuCuUcUuAcUTsT | 1087 | AGUAAgaAGagGCUUGgcuTsT | 1088 | AD- |
| | | | | | 14740 |
| 3233-3251 | UfgGfuUfcCfcUfgAfgGfaCfcAfgC | 1089 | p- | 1090 | AD- |
| | fTsT | | gCfuGfgUfcCfuCfaGfgGfaAfcCfaTsT | | 15086 |
| 3233-3251 | UfGGUfUfCfCfCfUfGAGGACfCfAGC | 1091 | GCfUfGGUfCfCfUfCfAGGGAACfCfATsT | 1092 | AD- |
| | fTsT | | | | 15096 |
| 3233-3251 | UgGuUcCcUgAgGaCcAgCTsT | 1093 | p- | 1094 | AD- |
| | | | gCfuGfgUfcCfuCfaGfgGfaAfcCfaTsT | | 15106 |
| 3233-3251 | UgGuUcCcUgAgGaCcAgCTsT | 1095 | GCfUfGGUfCfCfUfCfAGGGAACfCfATsT | 1096 | AD- |
| | | | | | 15116 |
| 3233-3251 | UfgGfuUfcCfcUfgAfgGfaCfcAfgC | 1097 | GCUGGucCUcaGGGAAccaTsT | 1098 | AD- |
| | fTsT | | | | 15126 |
| 3233-3251 | UfGGUfUfCfCfCfUfGAGGACfCfAGC | 1099 | GCUGGucCUcaGGGAAccaTsT | 1100 | AD- |
| | fTsT | | | | 15136 |
| 3233-3251 | UgGuUcCcUgAgGaCcAgCTsT | 1101 | GCUGGucCUcaGGGAAccaTsT | 1102 | AD- |
| | | | | | 15146 |
| 3242-3260 | UCUUCUUACUUCACCCGGCTT | 1103 | GCCGGGUGAAGUAAGAAGATT | 1104 | AD- |
| | | | | | 15260 |
| 3243-3261 | CUUCUUACUUCACCCGGCUTT | 1105 | AGCCGGGUGAAGUAAGAAGTT | 1106 | AD- |
| | | | | | 15371 |
| 3244-3262 | UUCUUACUUCACCCGGCUGTT | 1107 | CAGCCGGGUGAAGUAAGAATT | 1108 | AD- |
| | | | | | 15372 |
| 3262-3280 | GGGCUCCUCAUUUUUACGGTT | 1109 | CCGUAAAAAUGAGGAGCCCTT | 1110 | AD- |
| | | | | | 15172 |
| 3263-3281 | GGCUCCUCAUUUUUACGGGTT | 1111 | CCCGUAAAAAUGAGGAGCCTT | 1112 | AD- |
| | | | | | 15295 |
| 3264-3282 | GCUCCUCAUUUUUACGGGUTT | 1113 | ACCCGUAAAAAUGAGGAGCTT | 1114 | AD- |
| | | | | | 15373 |
| 3265-3283 | CUCCUCAUUUUUACGGGUATT | 1115 | UACCCGUAAAAAUGAGGAGTT | 1116 | AD- |
| | | | | | 15163 |
| 3266-3284 | UCCUCAUUUUUACGGGUAATT | 1117 | UUACCCGUAAAAAUGAGGATT | 1118 | AD- |
| | | | | | 15165 |
| 3267-3285 | CCUCAUUUUUACGGGUAACTT | 1119 | GUUACCCGUAAAAAUGAGGTT | 1120 | AD- |
| | | | | | 15374 |
| 3268-3286 | CUCAUUUUUACGGGUAACATT | 1121 | UGUUACCCGUAAAAAUGAGTT | 1122 | AD- |
| | | | | | 15296 |
| 3270-3288 | CAUUUUUACGGGUAACAGUTT | 1123 | ACUGUUACCCGUAAAAAUGTT | 1124 | AD- |
| | | | | | 15261 |
| 3271-3289 | AUUUUUACGGGUAACAGUGTT | 1125 | CACUGUUACCCGUAAAAAUTT | 1126 | AD- |
| | | | | | 15375 |
| 3274-3292 | UUUACGGGUAACAGUGAGGTT | 1127 | CCUCACUGUUACCCGUAAATT | 1128 | AD- |
| | | | | | 15262 |
| 3308-3326 | CAGACCAGGAAGCUCGGUGTT | 1129 | CACCGAGCUUCCUGGUCUGTT | 1130 | AD- |
| | | | | | 15376 |
| 3310-3328 | GACCAGGAAGCUCGGUGAGTT | 1131 | CUCACCGAGCUUCCUGGUCTT | 1132 | AD- |
| | | | | | 15377 |
| 3312-3330 | CCAGGAAGCUCGGUGAGUGTT | 1133 | CACUCACCGAGCUUCCUGGTT | 1134 | AD- |
| | | | | | 15409 |
| 3315-3333 | GGAAGCUCGGUGAGUGAUGTT | 1135 | CAUCACUCACCGAGCUUCCTT | 1136 | AD- |
| | | | | | 15378 |
| 3324-3342 | GUGAGUGAUGGCAGAACGATT | 1137 | UCGUUCUGCCAUCACUCACTT | 1138 | AD- |
| | | | | | 15410 |
| 3326-3344 | GAGUGAUGGCAGAACGAUGTT | 1139 | CAUCGUUCUGCCAUCACUCTT | 1140 | AD- |
| | | | | | 15379 |
| 3330-3348 | GAUGGCAGAACGAUGCCUGTT | 1141 | CAGGCAUCGUUCUGCCAUCTT | 1142 | AD- |
| | | | | | 15187 |
| 3336-3354 | AGAACGAUGCCUGCAGGCATT | 1143 | UGCCUGCAGGCAUCGUUCUTT | 1144 | AD- |
| | | | | | 15263 |
| 3339-3357 | ACGAUGCCUGCAGGCAUGGTT | 1145 | CCAUGCCUGCAGGCAUCGUTT | 1146 | AD- |
| | | | | | 15264 |
| 3348-3366 | GCAGGCAUGGAACUUUUUCTT | 1147 | GAAAAAGUUCCAUGCCUGCTT | 1148 | AD- |
| | | | | | 15297 |
| 3356-3374 | GGAACUUUUUCCGUUAUCATT | 1149 | UGAUAACGGAAAAAGUUCCTT | 1150 | AD- |
| | | | | | 15208 |
| 3357-3375 | GAACUUUUUCCGUUAUCACTT | 1151 | GUGAUAACGGAAAAAGUUCTT | 1152 | AD- |
| | | | | | 15209 |
| 3358-3376 | AACUUUUUCCGUUAUCACCTT | 1153 | GGUGAUAACGGAAAAAGUUTT | 1154 | AD- |
| | | | | | 15193 |
| 3370-3388 | UAUCACCCAGGCCUGAUUCTT | 1155 | GAAUCAGGCCUGGGUGAUATT | 1156 | AD- |
| | | | | | 15380 |
| 3378-3396 | AGGCCUGAUUCACUGGCCUTT | 1157 | AGGCCAGUGAAUCAGGCCUTT | 1158 | AD- |
| | | | | | 15298 |
| 3383-3401 | UGAUUCACUGGCCUGGCGGTT | 1159 | CCGCCAGGCCAGUGAAUCATT | 1160 | AD- |
| | | | | | 15299 |
| 3385-3403 | AUUCACUGGCCUGGCGGAGTT | 1161 | CUCCGCCAGGCCAGUGAAUTT | 1162 | AD- |
| | | | | | 15265 |
| 3406-3424 | GCUUCUAAGGCAUGGUCGGTT | 1163 | CCGACCAUGCCUUAGAAGCTT | 1164 | AD- |
| | | | | | 15381 |
| 3407-3425 | CUUCUAAGGCAUGGUCGGGTT | 1165 | CCCGACCAUGCCUUAGAAGTT | 1166 | AD- |
| | | | | | 15210 |
| 3429-3447 | GAGGGCCAACAACUGUCCCTT | 1167 | GGGACAGUUGUUGGCCCUCTT | 1168 | AD- |
| | | | | | 15270 |
| 3440-3458 | ACUGUCCCUCCUUGAGCACTsT | 1169 | GUGCUCAAGGAGGGACAGUTsT | 1170 | AD- |
| | | | | | 9591 |
| 3440-3458 | AcuGucccuccuuGAGcAcTsT | 1171 | GUGCUcAAGGAGGGAcAGUTsT | 1172 | AD- |
| | | | | | 9717 |
| 3441-3459 | CUGUCCCUCCUUGAGCACCTsT | 1173 | GGUGCUCAAGGAGGGACAGTsT | 1174 | AD- |
| | | | | | 9622 |
| 3441-3459 | cuGucccuccuuGAGcAccTsT | 1175 | GGUGCUcAAGGAGGGAcAGTsT | 1176 | AD- |
| | | | | | 9748 |
| 3480-3498 | ACAUUUAUCUUUUGGGUCUTsT | 1177 | AGACCCAAAAGAUAAAUGUTsT | 1178 | AD- |
| | | | | | 9587 |
| 3480-3498 | AcAuuuAucuuuuGGGucuTsT | 1179 | AGACCcAAAAGAuAAAUGUTsT | 1180 | AD- |
| | | | | | 9713 |
| 3480-3498 | AfcAfuUfuAfuCfuUfuUfgGfgUfcU | 1181 | p- | 1182 | AD- |
| | fTsT | | aGfaCfcCfaAfaAfgAfuAfaAfuGfuTsT | | 14679 |
| 3480-3498 | ACfAUfUfUfAUfCfUfUfUfUfGGGUf | 1183 | AGACfCfCfAAAAGAUfAAAUfGUfTsT | 1184 | AD- |
| | CfUfTsT | | | | 14689 |
| 3480-3498 | AcAuUuAuCuUuUgGgUcUTsT | 1185 | p- | 1186 | AD- |
| | | | aGfaCfcCfaAfaAfgAfuAfaAfuGfuTsT | | 14699 |
| 3480-3498 | AcAuUuAuCuUuUgGgUcUTsT | 1187 | AGACfCfCfAAAAGAUfAAAUfGUfTsT | 1188 | AD- |
| | | | | | 14709 |
| 3480-3498 | AfcAfuUfuAfuCfuUfuUfgGfgUfcU | 1189 | AGACCcaAAagAUAAAuguTsT | 1190 | AD- |
| | fTsT | | | | 14719 |
| 3480-3498 | ACfAUfUfUfAUfCfUfUfUfUfGGGUf | 1191 | AGACCcaAAagAUAAAuguTsT | 1192 | AD- |
| | CfUfTsT | | | | 14729 |
| 3480-3498 | AcAuUuAuCuUuUgGgUcUTsT | 1193 | AGACCcaAAagAUAAAuguTsT | 1194 | AD- |
| | | | | | 14739 |
| 3480-3498 | GfcCfaUfcUfgCfuGfcCfgGfaGfcC | 1195 | p- | 1196 | AD- |
| | fTsT | | gGfcUfcCfgGfcAfgCfaGfaUfgGfcTsT | | 15085 |
| 3480-3498 | GCfCfAUfCfUfGCfUfGCfCfGGAGCf | 1197 | GGCfUfCfCfGGCfAGCfAGAUfGGCfTsT | 1198 | AD- |
| | CfTsT | | | | 15095 |
| 3480-3498 | GcCaUcUgCuGcCgGaGcCTsT | 1199 | p- | 1200 | AD- |
| | | | gGfcUfcCfgGfcAfgCfaGfaUfgGfcTsT | | 15105 |
| 3480-3498 | GcCaUcUgCuGcCgGaGcCTsT | 1201 | GGCfUfCfCfGGCfAGCfAGAUfGGCfTsT | 1202 | AD- |
| | | | | | 15115 |
| 3480-3498 | GfcCfaUfcUfgCfuGfcCfgGfaGfcC | 1203 | GGCUCauGCagCAGAUggcTsT | 1204 | AD- |
| | fTsT | | | | 15125 |
| 3480-3498 | GCfCfAUfCfUfGCfUfGCfCfGGAGCf | 1205 | GGCUCauGCagCAGAUggcTsT | 1206 | AD- |
| | CfTsT | | | | 15135 |
| 3480-3498 | GcCaUcUgCuGcCgGaGcCTsT | 1207 | GGCUCauGCagCAGAUggcTsT | 1208 | AD- |
| | | | | | 15145 |
| 3481-3499 | CAUUUAUCUUUUGGGUCUGTsT | 1209 | CAGACCCAAAAGAUAAAUGTsT | 1210 | AD- |
| | | | | | 9578 |
| 3481-3499 | cAuuuAucuuuuGGGucuGTsT | 1211 | cAGACCcAAAAGAuAAAUGTsT | 1212 | AD- |
| | | | | | 9704 |
| 3485-3503 | UAUCUUUUGGGUCUGUCCUTsT | 1213 | AGGACAGACCCAAAAGAUATsT | 1214 | AD- |
| | | | | | 9558 |
| 3485-3503 | uAucuuuuGGGucuGuccuTsT | 1215 | AGGAcAGACCcAAAAGAuATsT | 1216 | AD- |
| | | | | | 9684 |
| 3504-3522 | CUCUGUUGCCUUUUUACAGTsT | 1217 | CUGUAAAAAGGCAACAGAGTsT | 1218 | AD- |
| | | | | | 9634 |
| 3504-3522 | cucuGuuGccuuuuuAcAGTsT | 1219 | CUGuAAAAAGGcAAcAGAGTsT | 1220 | AD- |
| | | | | | 9760 |
| 3512-3530 | CCUUUUUACAGCCAACUUUTT | 1221 | AAAGUUGGCUGUAAAAAGGTT | 1222 | AD- |
| | | | | | 15411 |
| 3521-3539 | AGCCAACUUUUCUAGACCUTT | 1223 | AGGUCUAGAAAAGUUGGCUTT | 1224 | AD- |
| | | | | | 15266 |
| 3526-3544 | ACUUUUCUAGACCUGUUUUTT | 1225 | AAAACAGGUCUAGAAAAGUTT | 1226 | AD- |
| | | | | | 15382 |
| 3530-3548 | UUCUAGACCUGUUUUGCUUTsT | 1227 | AAGCAAAACAGGUCUAGAATsT | 1228 | AD- |
| | | | | | 9554 |
| 3530-3548 | uucuAGAccuGuuuuGcuuTsT | 1229 | AAGcAAAAcAGGUCuAGAATsT | 1230 | AD- |
| | | | | | 9680 |
| 3530-3548 | UfuCfuAfgAfcCfuGfuUfuUfgCfuU | 1231 | p- | 1232 | AD- |
| | fTsT | | aAfgCfaAfaAfcAfgGfuCfuAfgAfaTsT | | 14676 |
| 3530-3548 | UfUfCfUfAGACfCfUfGUfUfUfUfGC | 1233 | AAGCfAAAACfAGGUfCfUfAGAATsT | 1234 | AD- |
| | fUfUfTsT | | | | 14686 |
| 3530-3548 | UuCuAgAcCuGuUuUgCuUTsT | 1235 | p- | 1236 | AD- |
| | | | aAfgCfaAfaAfcAfgGfuCfuAfgAfaTsT | | 14696 |
| 3530-3548 | UuCuAgAcCuGuUuUgCuUTsT | 1237 | AAGCfAAAACfAGGUfCfUfAGAATsT | 1238 | AD- |
| | | | | | 14706 |
| 3530-3548 | UfuCfuAfgAfcCfuGfuUfuUffCfuU | 1239 | AAGcAaaACagGUCUAgaaTsT | 1240 | AD- |
| | fTsT | | | | 14716 |
| 3530-3548 | UfUfCfUfAGACfCfUfGUfUfUfUfGC | 1241 | AAGcAaaACagGUCUAgaaTsT | 1242 | AD- |
| | fUfUfTsT | | | | 14726 |
| 3530-3548 | UuCuAgAcCuGuUuUgCuUTsT | 1243 | AAGcAaaACagGUCUAgaaTsT | 1244 | AD- |
| | | | | | 14736 |
| 3530-3548 | CfaUfaGfgCfcUfgGfaGfuUfuAfuU | 1245 | p- | 1246 | AD- |
| | fTsT | | aAfuAfaAfcUfcCfaGfgCfcUfaUfgTsT | | 15082 |
| 3530-3548 | CfAUfAGGCfCfUfGGAGUfUfUfAUfU | 1247 | AAUfAAACfUfCfCfAGGCfCfUfAUfGTsT | 1248 | AD- |
| | fTsT | | | | 15092 |
| 3530-3548 | CaUaGgCcUgGaGuUuAuUTsT | 1249 | p- | 1250 | AD- |
| | | | aAfuAfaAfcUfcCfaGfgCfcUfaUfgTsT | | 15102 |
| 3530-3548 | CaUaGgCcUgGaGuUuAuUTsT | 1251 | AAUfAAACfUfCfCfAGGCfCfUfAUfGTsT | 1252 | AD- |
| | | | | | 15112 |
| 3530-3548 | CfaUfaGfgCfcUfgGfaGfuUfuAfuU | 1251 | AAUAAacUCcaGGCCUaugTsT | 1254 | AD- |
| | fTsT | | | | 15122 |
| 3530-3548 | CfAUfAGGCfCfUfGGAGUfUfUfAUfU | 1255 | AAUAAacUCcaGGCCUaugTsT | 1256 | AD- |
| | fTsT | | | | 15132 |
| 3530-3548 | CaUaGgCcUgGaGuUuAuUTsT | 1257 | AAUAAacUCcaGGCCUaugTsT | 1258 | AD- |
| | | | | | 15142 |
| 3531-3549 | UCUAGACCUGUUUUGCUUUTsT | 1259 | AAAGCAAAACAGGUCUAGATsT | 1260 | AD- |
| | | | | | 9553 |
| 3531-3549 | ucuAGAccuGuuuuGcuuuTsT | 1261 | AAAGcAAAAcAGGUCuAGATsT | 1262 | AD- |
| | | | | | 9679 |
| 3531-3549 | UfcUfaGfaCfcUfgUfuUfuGfcUfuU | 1263 | p- | 1264 | AD- |
| | fTsT | | aAfaGfcAfaAfaCfaGfgUfcUfaGfaTsT | | 14675 |
| 3531-3549 | UfCfUfAGACfCfUfGUfUfUfUfGCfU | 1265 | AAAGCfAAAACfAGGUfCfUfAGATsT | 1266 | AD- |
| | fUfUfTsT | | | | 14685 |
| 3531-3549 | UcUaGaCcUgUuUuGcUuUTsT | 1267 | p- | 1268 | AD- |
| | | | aAfaGfcAfaAfaCfaGfgUfcUfaGfaTsT | | 14695 |
| 3531-3549 | UcUaGaCcUgUuUuGcUuUTsT | 1269 | AAAGCfAAAACfAGGUfCfUfAGATsT | 1270 | AD- |
| | | | | | 14705 |
| 3531-3549 | UfcUfaGfaCfcUfgUfuUfuGfcUfuU | 1271 | AAAGCaaAAcaGGUCUagaTsT | 1272 | AD- |
| | fTsT | | | | 14715 |
| 3531-3549 | UfCfUfAGACfCfUfGUfUfUfUfGCfU | 1273 | AAAGCaaAAcaGGUCUagaTsT | 1274 | AD- |
| | fUfUfTsT | | | | 14725 |
| 3531-3549 | UcUaGaCcUgUuUuGcUuUTsT | 1275 | AAAGCaaAAcaGGUCUagaTsT | 1276 | AD- |
| | | | | | 14735 |
| 3531-3549 | UfcAfuAfgGfcCfuGfgAfgUfuUfaU | 1277 | p- | 1278 | AD- |
| | fTsT | | aUfaAfaCfuCfcAfgGfcCfuAfuGfaTsT | | 15081 |
| 3531-3549 | UfCfAUfAGGCfCfUfGGAGUfUfUfAU | 1279 | AUfAAACfUfCfCfAGGCfCfUfAUfGATsT | 1280 | AD- |
| | fTsT | | | | 15091 |
| 3531-3549 | UcAuAgGcCuGgAgUuUaUTsT | 1281 | p- | 1282 | AD- |
| | | | aUfaAfaCfuCfcAfgGfcCfuAfuGfaTsT | | 15101 |
| 3531-3549 | UcAuAgGcCuGgAgUuUaUTsT | 1283 | AUfAAACfUfCfCfAGGCfCfUfAUfGATsT | 1284 | AD- |
| | | | | | 15111 |
| 3531-3549 | UfcAfuAfgGfcCfuGfgAfgUfuUfaU | 1285 | AUAAAcuCCagGCCUAugaTsT | 1286 | AD- |
| | fTsT | | | | 15121 |
| 3531-3549 | UfCfAUfAGGCfCfUfGGAGUfUfUfAU | 1287 | AUAAAcuCCagGCCUAugaTsT | 1288 | AD- |
| | fTsT | | | | 15131 |
| 3531-3549 | UcAuAgGcCuGgAgUuUaUTsT | 1289 | AUAAAcuCCagGCCUAugaTsT | 1290 | AD- |
| | | | | | 15141 |
| 3557-3575 | UGAAGAUAUUUAUUCUGGGTsT | 1291 | CCCAGAAUAAAUAUCUUCATsT | 1292 | AD- |
| | | | | | 9626 |
| 3557-3575 | uGAAGAuAuuuAuucuGGGTsT | 1293 | CCcAGAAuAAAuAUCUUcATsT | 1294 | AD- |
| | | | | | 9752 |
| 3570-3588 | UCUGGGUUUUGUAGCAUUUTsT | 1295 | AAAUGCUACAAAACCCAGATsT | 1296 | AD- |
| | | | | | 9629 |
| 3570-3588 | ucuGGGuuuuGuAGcAuuuTsT | 1297 | AAAUGCuAcAAAACCcAGATsT | 1298 | AD- |
| | | | | | 9755 |
| 3613-3631 | AUAAAAACAAACAAACGUUTT | 1299 | AACGUUUGUUUGUUUUUAUTT | 1300 | AD- |
| | | | | | 15412 |
| 3617-3635 | AAACAAACAAACGUUGUCCTT | 1301 | GGACAACGUUUGUUUGUUUTT | 1302 | AD- |
| | | | | | 15211 |
| 3618-3636 | AACAAACAAACGUUGUCCUTT | 1303 | AGGACAACGUUUGUUUGUUTT | 1304 | AD- |
| | | | | | 15300 |

U, C, A, G: corresponding ribonucleotide;
T: deoxythymidine;
u, c, a, g: corresponding 2′-O-methyl ribonucleotide;
Uf, Cf, Af, Gf: corresponding 2′-deoxy-2′-fluoro ribonucleotide;
where nucleotides are written in sequence, they are connected by 3′-5′ phosphodiester groups;
nucleotides with interjected “s” are connected by 3′-O-5′-O phosphorothiodiester groups;
unless denoted by prefix “p-”, oligonucleotides are devoid of a 5′-phosphate group on the 5′-most nucleotide;
all oligonucleotides bear 3′-OH on the 3′-most nucleotide

TABLE 1b
Screening of siRNAs targeted to PCSK9

| | Mean percent remaining mRNA transcript | | | | | |
|---|---|---|---|---|---|---|
| | at siRNA concentration/in cell type | | | | | |
| Duplex | 100 nM/ | 30 nM/ | 3 nM/ | 30 nM/ | IC50 in HepG2 | IC50 in Cynomolgous monkey |
| name | HepG2 | HepG2 | HepG2 | HeLa | [nM] | Hepatocyte [nM]s |
| AD-15220 | | | | 35 | | |
| AD-15275 | | | | 56 | | |
| AD-15301 | | | | 70 | | |
| AD-15276 | | | | 42 | | |
| AD-15302 | | | | 32 | | |
| AD-15303 | | | | 37 | | |
| AD-15221 | | | | 30 | | |
| AD-15413 | | | | 61 | | |
| AD-15304 | | | | 70 | | |
| AD-15305 | | | | 36 | | |
| AD-15306 | | | | 20 | | |
| AD-15307 | | | | 38 | | |
| AD-15277 | | | | 50 | | |
| AD-9526 | 74 | 89 | | | | |
| AD-9652 | | 97 | | | | |
| AD-9519 | | 78 | | | | |
| AD-9645 | | 66 | | | | |
| AD-9523 | | 55 | | | | |
| AD-9649 | | 60 | | | | |
| AD-9569 | | 112 | | | | |
| AD-9695 | | 102 | | | | |
| AD-15222 | | | | 75 | | |
| AD-15278 | | | | 78 | | |
| AD-15178 | | | | 83 | | |
| AD-15308 | | | | 84 | | |
| AD-15223 | | | | 67 | | |
| AD-15309 | | | | 34 | | |
| AD-15279 | | | | 44 | | |
| AD-15194 | | | | 63 | | |
| AD-15310 | | | | 42 | | |
| AD-15311 | | | | 30 | | |
| AD-15392 | | | | 18 | | |
| AD-15312 | | | | 21 | | |
| AD-15313 | | | | 19 | | |
| AD-15280 | | | | 81 | | |
| AD-15267 | | | | 82 | | |
| AD-15314 | | | | 32 | | |
| AD-15315 | | | | 74 | | |
| AD-9624 | | 94 | | | | |
| AD-9750 | | 96 | | | | |
| AD-9623 | 43 | 66 | | | | |
| AD-9749 | | 105 | | | | |
| AD-15384 | | | | 48 | | |
| AD-9607 | | 32 | 28 | | 0.20 | |
| AD-9733 | | 78 | 73 | | | |
| AD-9524 | | 23 | 28 | | 0.07 | |
| AD-9650 | | 91 | 90 | | | |
| AD-9520 | | 23 | 32 | | | |
| AD-9520 | | 23 | | | | |
| AD-9646 | | 97 | 108 | | | |
| AD-9608 | | 37 | | | | |
| AD-9734 | | 91 | | | | |
| AD-9546 | | 32 | | | | |
| AD-9672 | | 57 | | | | |
| AD-15385 | | | | 54 | | |
| AD-15393 | | | | 31 | | |
| AD-15316 | | | | 37 | | |
| AD-15317 | | | | 37 | | |
| AD-15318 | | | | 63 | | |
| AD-15195 | | | | 45 | | |
| AD-15224 | | | | 57 | | |
| AD-15188 | | | | 42 | | |
| AD-15225 | | | | 51 | | |
| AD-15281 | | | | 89 | | |
| AD-15282 | | | | 75 | | |
| AD-15319 | | | | 61 | | |
| AD-15226 | | | | 56 | | |
| AD-15271 | | | | 25 | | |
| AD-15283 | | | | 25 | | |
| AD-15284 | | | | 64 | | |
| AD-15189 | | | | 17 | | |
| AD-15227 | | | | 62 | | |
| AD-9547 | | 31 | 29 | | 0.20 | |
| AD-9673 | | 56 | 57 | | | |
| AD-9548 | | 54 | 60 | | | |
| AD-9674 | | 36 | 57 | | | |
| AD-9529 | | 60 | | | | |
| AD-9655 | | 140 | | | | |
| AD-9605 | | 27 | 31 | | 0.27 | |
| AD-9731 | | 31 | 31 | | 0.32 | |
| AD-9596 | | 37 | | | | |
| AD-9722 | | 76 | | | | |
| AD-9583 | | 42 | | | | |
| AD-9709 | | 104 | | | | |
| AD-9579 | | 113 | | | | |
| AD-9705 | | 81 | | | | |
| AD-15394 | | | | 32 | | |
| AD-15196 | | | | 72 | | |
| AD-15197 | | | | 85 | | |
| AD-15198 | | | | 71 | | |
| AD-9609 | 66 | 71 | | | | |
| AD-9735 | | 115 | | | | |
| AD-9537 | | 145 | | | | |
| AD-9663 | | 102 | | | | |
| AD-9528 | | 113 | | | | |
| AD-9654 | | 107 | | | | |
| AD-9515 | | 49 | | | | |
| AD-9641 | | 92 | | | | |
| AD-9514 | | 57 | | | | |
| AD-9640 | | 89 | | | | |
| AD-9530 | | 75 | | | | |
| AD-9656 | | 77 | | | | |
| AD-9538 | 79 | 80 | | | | |
| AD-9664 | | 53 | | | | |
| AD-9598 | 69 | 83 | | | | |
| AD-9724 | | 127 | | | | |
| AD-9625 | 58 | 88 | | | | |
| AD-9751 | | 60 | | | | |
| AD-9556 | | 46 | | | | |
| AD-9682 | | 38 | | | | |
| AD-9539 | 56 | 63 | | | | |
| AD-9665 | | 83 | | | | |
| AD-9517 | | 36 | | | | |
| AD-9643 | | 40 | | | | |
| AD-9610 | | 36 | 34 | | 0.04 | |
| AD-9736 | | 22 | 29 | | 0.04 | 0.5 |
| AD-14681 | | | | 33 | | |
| AD-14691 | | | | 27 | | |
| AD-14701 | | | | 32 | | |
| AD-14711 | | | | 33 | | |
| AD-14721 | | | | 22 | | |
| AD-14731 | | | | 21 | | |
| AD-14741 | | | | 22 | | |
| AD-15087 | | | | 37 | | |
| AD-15097 | | | | 51 | | |
| AD-15107 | | | | 26 | | |
| AD-15117 | | | | 28 | | |
| AD-15127 | | | | 33 | | |
| AD-15137 | | | | 54 | | |
| AD-15147 | | | | 52 | | |
| AD-9516 | | 94 | | | | |
| AD-9642 | | 105 | | | | |
| AD-9562 | | 46 | 51 | | | |
| AD-9688 | | 26 | 34 | | 4.20 | |
| AD-14677 | | | | 38 | | |
| AD-14687 | | | | 52 | | |
| AD-14697 | | | | 35 | | |
| AD-14707 | | | | 58 | | |
| AD-14717 | | | | 42 | | |
| AD-14727 | | | | 50 | | |
| AD-14737 | | | | 32 | | |
| AD-15083 | | | | 16 | | |
| AD-15093 | | | | 24 | | |
| AD-15103 | | | | 11 | | |
| AD-15113 | | | | 34 | | |
| AD-15123 | | | | 19 | | |
| AD-15133 | | | | 15 | | |
| AD-15143 | | | | 16 | | |
| AD-9521 | | 50 | | | | |
| AD-9647 | | 62 | | | | |
| AD-9611 | | 48 | | | | |
| AD-9737 | | 68 | | | | |
| AD-9592 | 46 | 55 | | | | |
| AD-9718 | | 78 | | | | |
| AD-9561 | | 64 | | | | |
| AD-9687 | | 84 | | | | |
| AD-9636 | | 42 | 41 | | 2.10 | |
| AD-9762 | | 9 | 28 | | 0.40 | 0.5 |
| AD-9540 | | 45 | | | | |
| AD-9666 | | 81 | | | | |
| AD-9535 | 48 | 73 | | | | |
| AD-9661 | | 83 | | | | |
| AD-9559 | | 35 | | | | |
| AD-9685 | | 77 | | | | |
| AD-9533 | | 100 | | | | |
| AD-9659 | | 88 | | | | |
| AD-9612 | | 122 | | | | |
| AD-9738 | | 83 | | | | |
| AD-9557 | 75 | 96 | | | | |
| AD-9683 | | 48 | | | | |
| AD-9531 | | 31 | 32 | | 0.53 | |
| AD-9657 | | 23 | 29 | | 0.66 | 0.5 |
| AD-14673 | | | | 81 | | |
| AD-14683 | | | | 56 | | |
| AD-14693 | | | | 56 | | |
| AD-14703 | | | | 68 | | |
| AD-14713 | | | | 55 | | |
| AD-14723 | | | | 24 | | |
| AD-14733 | | | | 34 | | |
| AD-15079 | | | | 85 | | |
| AD-15089 | | | | 54 | | |
| AD-15099 | | | | 70 | | |
| AD-15109 | | | | 67 | | |
| AD-15119 | | | | 67 | | |
| AD-15129 | | | | 57 | | |
| AD-15139 | | | | 69 | | |
| AD-9542 | | 160 | | | | |
| AD-9668 | | 92 | | | | |
| AD-9739 | | 109 | | | | |
| AD-9637 | 56 | 83 | | | | |
| AD-9763 | | 79 | | | | |
| AD-9630 | | 82 | | | | |
| AD-9756 | | 63 | | | | |
| AD-9593 | | 55 | | | | |
| AD-9719 | | 115 | | | | |
| AD-9601 | | 111 | | | | |
| AD-9727 | | 118 | | | | |
| AD-9573 | | 36 | 42 | | 1.60 | |
| AD-9699 | | 32 | 36 | | 2.50 | |
| AD-15228 | | | | 26 | | |
| AD-15395 | | | | 53 | | |
| AD-9602 | | 126 | | | | |
| AD-9728 | | 94 | | | | |
| AD-15386 | | | | 45 | | |
| AD-9580 | | 112 | | | | |
| AD-9706 | | 86 | | | | |
| AD-9581 | | 35 | | | | |
| AD-9707 | | 81 | | | | |
| AD-9543 | | 51 | | | | |
| AD-9669 | | 97 | | | | |
| AD-9574 | | 74 | | | | |
| AD-9700 | | | | | | |
| AD-15320 | | | | 26 | | |
| AD-15321 | | | | 34 | | |
| AD-15199 | | | | 64 | | |
| AD-15167 | | | | 86 | | |
| AD-15164 | | | | 41 | | |
| AD-15166 | | | | 43 | | |
| AD-15322 | | | | 64 | | |
| AD-15200 | | | | 46 | | |
| AD-15213 | | | | 27 | | |
| AD-15229 | | | | 44 | | |
| AD-15215 | | | | 49 | | |
| AD-15214 | | | | 101 | | |
| AD-9315 | | 15 | 32 | | 0.98 | |
| AD-9326 | | 35 | 51 | | | |
| AD-9318 | | 14 | 37 | | 0.40 | |
| AD-9323 | | 14 | 33 | | | |
| AD-9314 | | 11 | 22 | | 0.04 | |
| AD-10792 | | | | | 0.10 | 0.10 |
| AD-10796 | | | | | 0.1 | 0.1 |
| AD-9638 | | 101 | | | | |
| AD-9764 | | 112 | | | | |
| AD-9525 | | 53 | | | | |
| AD-9651 | | 58 | | | | |
| AD-9560 | | 97 | | | | |
| AD-9686 | | 111 | | | | |
| AD-9536 | | 157 | | | | |
| AD-9662 | | 81 | | | | |
| AD-9584 | 52 | 68 | | | | |
| AD-9710 | | 111 | | | | |
| AD-15323 | | | | 62 | | |
| AD-9551 | | 91 | | | | |
| AD-9677 | | 62 | | | | |
| AD-15230 | | | | 52 | | |
| AD-15231 | | | | 25 | | |
| AD-15285 | | | | 36 | | |
| AD-15396 | | | | 27 | | |
| AD-15397 | | | | 56 | | |
| AD-9600 | | 112 | | | | |
| AD-9726 | | 95 | | | | |
| AD-9606 | | 107 | | | | |
| AD-9732 | | 105 | | | | |
| AD-9633 | 56 | 75 | | | | |
| AD-9759 | | 111 | | | | |
| AD-9588 | | 66 | | | | |
| AD-9714 | | 106 | | | | |
| AD-9589 | 67 | 85 | | | | |
| AD-9715 | | 113 | | | | |
| AD-9575 | | 120 | | | | |
| AD-9701 | | 100 | | | | |
| AD-9563 | | 103 | | | | |
| AD-9689 | | 81 | | | | |
| AD-9594 | 80 | 95 | | | | |
| AD-9720 | | 92 | | | | |
| AD-9585 | | 83 | | | | |
| AD-9711 | | 122 | | | | |
| AD-9614 | | 100 | | | | |
| AD-9740 | | 198 | | | | |
| AD-9615 | | 116 | | | | |
| AD-9741 | | 130 | | | | |
| AD-9534 | | 32 | 30 | | | |
| AD-9534 | | 32 | | | | |
| AD-9660 | | 89 | 79 | | | |
| AD-15324 | | | | 46 | | |
| AD-15232 | | | | 19 | | |
| AD-15233 | | | | 25 | | |
| AD-15234 | | | | 59 | | |
| AD-15286 | | | | 109 | | |
| AD-9590 | | 122 | | | | |
| AD-9716 | | 114 | | | | |
| AD-9632 | | 34 | | | | |
| AD-9758 | | 96 | | | | |
| AD-9567 | | 41 | | | | |
| AD-9693 | | 50 | | | | |
| AD-9586 | 81 | 104 | | | | |
| AD-9712 | | 107 | | | | |
| AD-9564 | | 120 | | | | |
| AD-9690 | | 92 | | | | |
| AD-9616 | 74 | 84 | | | | |
| AD-9742 | | 127 | | | | |
| AD-15398 | | | | 24 | | |
| AD-9617 | | 111 | | | | |
| AD-9743 | | 104 | | | | |
| AD-9635 | 73 | 90 | | | | |
| AD-9761 | | 15 | 33 | | | 0.5 |
| AD-9568 | | 76 | | | | |
| AD-9694 | | 52 | | | | |
| AD-9576 | | 47 | | | | |
| AD-9702 | | 79 | | | | |
| AD-9627 | | 69 | | | | |
| AD-9753 | | 127 | | | | |
| AD-9628 | | 141 | | | | |
| AD-9754 | | 89 | | | | |
| AD-9631 | | 80 | | | | |
| AD-9757 | | 78 | | | | |
| AD-9595 | | 31 | 32 | | | |
| AD-9721 | | 87 | 70 | | | |
| AD-9544 | | 68 | | | | |
| AD-9670 | | 67 | | | | |
| AD-15235 | | | | 25 | | |
| AD-15236 | | | | 73 | | |
| AD-15168 | | | | 100 | | |
| AD-15174 | | | | 92 | | |
| AD-15325 | | | | 81 | | |
| AD-15326 | | | | 65 | | |
| AD-9570 | 35 | 42 | | | | |
| AD-9696 | | 77 | | | | |
| AD-9566 | | 38 | | | | |
| AD-9692 | | 78 | | | | |
| AD-9532 | | 100 | | | | |
| AD-9658 | | 102 | | | | |
| AD-9549 | | 50 | | | | |
| AD-9675 | | 78 | | | | |
| AD-9541 | | 43 | | | | |
| AD-9667 | | 73 | | | | |
| AD-9550 | | 36 | | | | |
| AD-9676 | | 100 | | | | |
| AD-9571 | | 27 | 32 | | | |
| AD-9697 | | 74 | 89 | | | |
| AD-9572 | 47 | 53 | | | | |
| AD-9698 | | 73 | | | | |
| AD-15327 | | | | 82 | | |
| AD-9639 | | 30 | 35 | | | |
| AD-9765 | | 82 | 74 | | | |
| AD-9518 | | 31 | 35 | | 0.60 | |
| AD-9518 | | 31 | | | | |
| AD-9644 | | 35 | 37 | | 2.60 | 0.5 |
| AD-14672 | | | | 26 | | |
| AD-14682 | | | | 27 | | |
| AD-14692 | | | | 22 | | |
| AD-14702 | | | | 19 | | |
| AD-14712 | | | | 25 | | |
| AD-14722 | | | | 18 | | |
| AD-14732 | | | | 32 | | |
| AD-15078 | | | | 86 | | |
| AD-15088 | | | | 97 | | |
| AD-15098 | | | | 74 | | |
| AD-15108 | | | | 67 | | |
| AD-15118 | | | | 76 | | |
| AD-15128 | | | | 86 | | |
| AD-15138 | | | | 74 | | |
| AD-15237 | | | | 30 | | |
| AD-15287 | | | | 30 | | |
| AD-15238 | | | | 36 | | |
| AD-15328 | | | | 35 | | |
| AD-15399 | | | | 47 | | |
| AD-9582 | | 37 | | | | |
| AD-9708 | | 81 | | | | |
| AD-9545 | | 31 | 43 | | | |
| AD-9671 | | 15 | 33 | | 2.50 | |
| AD-14674 | | | | 16 | | |
| AD-14684 | | | | 26 | | |
| AD-14694 | | | | 18 | | |
| AD-14704 | | | | 27 | | |
| AD-14714 | | | | 20 | | |
| AD-14724 | | | | 18 | | |
| AD-14734 | | | | 18 | | |
| AD-15080 | | | | 29 | | |
| AD-15090 | | | | 23 | | |
| AD-15100 | | | | 26 | | |
| AD-15110 | | | | 23 | | |
| AD-15120 | | | | 20 | | |
| AD-15130 | | | | 20 | | |
| AD-15140 | | | | 19 | | |
| AD-9522 | | 59 | | | | |
| AD-9648 | | 78 | | | | |
| AD-9552 | | 80 | | | | |
| AD-9678 | | 76 | | | | |
| AD-9618 | | 90 | | | | |
| AD-9744 | | 91 | | | | |
| AD-15239 | | | | 38 | | |
| AD-15212 | | | | 19 | | |
| AD-15240 | | | | 43 | | |
| AD-15177 | | | | 59 | | |
| AD-15179 | | | | 13 | | |
| AD-15180 | | | | 15 | | |
| AD-15241 | | | | 14 | | |
| AD-15268 | | | | 42 | | |
| AD-15242 | | | | 21 | | |
| AD-15216 | | | | 28 | | |
| AD-15176 | | | | 35 | | |
| AD-15181 | | | | 35 | | |
| AD-15243 | | | | 22 | | |
| AD-15182 | | | | 42 | | |
| AD-15244 | | | | 31 | | |
| AD-15387 | | | | 23 | | |
| AD-15245 | | | | 18 | | |
| AD-9555 | | 34 | | | | |
| AD-9681 | | 55 | | | | |
| AD-9619 | 42 | 61 | | | | |
| AD-9745 | | 56 | | | | |
| AD-9620 | 44 | 77 | | | | |
| AD-9746 | | 89 | | | | |
| AD-15288 | | | | 19 | | |
| AD-15246 | | | | 16 | | |
| AD-15289 | | | | 37 | | |
| AD-9324 | | 59 | 67 | | | |
| AD-15329 | | | | 103 | | |
| AD-15330 | | | | 62 | | |
| AD-15169 | | | | 22 | | |
| AD-15201 | | | | 6 | | |
| AD-15331 | | | | 14 | | |
| AD-15190 | | | | 47 | | |
| AD-15247 | | | | 61 | | |
| AD-15248 | | | | 22 | | |
| AD-15175 | | | | 45 | | |
| AD-15249 | | | | 51 | | |
| AD-15250 | | | | 96 | | |
| AD-15400 | | | | 12 | | |
| AD-15332 | | | | 22 | | |
| AD-15388 | | | | 30 | | |
| AD-15333 | | | | 20 | | |
| AD-15334 | | | | 96 | | |
| AD-15335 | | | | 75 | | |
| AD-15183 | | | | 16 | | |
| AD-15202 | | | | 41 | | |
| AD-15203 | | | | 39 | | |
| AD-15272 | | | | 49 | | |
| AD-15217 | | | | 16 | | |
| AD-15290 | | | | 15 | | |
| AD-15218 | | | | 13 | | |
| AD-15389 | | | | 13 | | |
| AD-15336 | | | | 40 | | |
| AD-15337 | | | | 19 | | |
| AD-15191 | | | | 33 | | |
| AD-15390 | | | | 25 | | |
| AD-15338 | | | | 9 | | |
| AD-15204 | | | | 33 | | |
| AD-15251 | | | | 76 | | |
| AD-15205 | | | | 14 | | |
| AD-15171 | | | | 16 | | |
| AD-15252 | | | | 58 | | |
| AD-15339 | | | | 20 | | |
| AD-15253 | | | | 15 | | |
| AD-15340 | | | | 18 | | |
| AD-15291 | | | | 17 | | |
| AD-15341 | | | | 11 | | |
| AD-15401 | | | | 13 | | |
| AD-15342 | | | | 30 | | |
| AD-15343 | | | | 21 | | |
| AD-15292 | | | | 16 | | |
| AD-15344 | | | | 20 | | |
| AD-15254 | | | | 18 | | |
| AD-15345 | | | | 18 | | |
| AD-15206 | | | | 15 | | |
| AD-15346 | | | | 16 | | |
| AD-15347 | | | | 62 | | |
| AD-9577 | | 33 | 31 | | | |
| AD-9703 | | 17 | 26 | | | |
| AD-14678 | | | | 22 | | |
| AD-14688 | | | | 23 | | |
| AD-14698 | | | | 23 | | |
| AD-14708 | | | | 14 | | |
| AD-14718 | | | | 31 | | |
| AD-14728 | | | | 25 | | |
| AD-14738 | | | | 31 | | |
| AD-15084 | | | | 19 | | |
| AD-15094 | | | | 11 | | |
| AD-15104 | | | | 16 | | |
| AD-15114 | | | | 15 | | |
| AD-15124 | | | | 11 | | |
| AD-15134 | | | | 12 | | |
| AD-15144 | | | | 9 | | |
| AD-15391 | | | | 7 | | |
| AD-15348 | | | | 13 | | |
| AD-15349 | | | | 8 | | |
| AD-15170 | | | | 40 | | |
| AD-15350 | | | | 14 | | |
| AD-15402 | | | | 27 | | |
| AD-15293 | | | | 27 | | |
| AD-15351 | | | | 14 | | |
| AD-15403 | | | | 11 | | |
| AD-15404 | | | | 38 | | |
| AD-15207 | | | | 15 | | |
| AD-15352 | | | | 23 | | |
| AD-15255 | | | | 31 | | |
| AD-9603 | | 123 | | | | |
| AD-9729 | | 56 | | | | |
| AD-9599 | | 139 | | | | |
| AD-9725 | | 38 | | | | |
| AD-9621 | | 77 | | | | |
| AD-9747 | | 63 | | | | |
| AD-15405 | | | | 32 | | |
| AD-15353 | | | | 39 | | |
| AD-15354 | | | | 49 | | |
| AD-15406 | | | | 35 | | |
| AD-15407 | | | | 39 | | |
| AD-15355 | | | | 18 | | |
| AD-15356 | | | | 50 | | |
| AD-15357 | | | | 54 | | |
| AD-15269 | | | | 23 | | |
| AD-9565 | | 74 | | | | |
| AD-9691 | | 49 | | | | |
| AD-15358 | | | | 12 | | |
| AD-15359 | | | | 24 | | |
| AD-15360 | | | | 13 | | |
| AD-15219 | | | | 19 | | |
| AD-15361 | | | | 24 | | |
| AD-15273 | | | | 36 | | |
| AD-15362 | | | | 31 | | |
| AD-15192 | | | | 20 | | |
| AD-15256 | | | | 19 | | |
| AD-15363 | | | | 33 | | |
| AD-15364 | | | | 24 | | |
| AD-9604 | 35 | 49 | | | | |
| AD-9730 | | 85 | | | | |
| AD-9527 | | 45 | | | | |
| AD-9653 | | 86 | | | | |
| AD-15365 | | | | 62 | | |
| AD-15294 | | | | 30 | | |
| AD-15173 | | | | 12 | | |
| AD-15366 | | | | 21 | | |
| AD-15367 | | | | 11 | | |
| AD-15257 | | | | 18 | | |
| AD-15184 | | | | 50 | | |
| AD-15185 | | | | 12 | | |
| AD-15258 | | | | 73 | | |
| AD-15186 | | | | 36 | | |
| AD-15274 | | | | 19 | | |
| AD-15368 | | | | 7 | | |
| AD-15369 | | | | 17 | | |
| AD-15370 | | | | 19 | | |
| AD-15259 | | | | 38 | | |
| AD-15408 | | | | 52 | | |
| AD-9597 | | 23 | 21 | | 0.04 | |
| AD-9723 | | 12 | 26 | | | 0.5 |
| AD-14680 | | | | 15 | | |
| AD-14690 | | | | 18 | | |
| AD-14700 | | | | 15 | | |
| AD-14710 | | | | 15 | | |
| AD-14720 | | | | 18 | | |
| AD-14730 | | | | 18 | | |
| AD-14740 | | | | 17 | | |
| AD-15086 | | | | 85 | | |
| AD-15096 | | | | 70 | | |
| AD-15106 | | | | 71 | | |
| AD-15116 | | | | 73 | | |
| AD-15126 | | | | 71 | | |
| AD-15136 | | | | 56 | | |
| AD-15146 | | | | 72 | | |
| AD-15260 | | | | 79 | | |
| AD-15371 | | | | 24 | | |
| AD-15372 | | | | 52 | | |
| AD-15172 | | | | 27 | | |
| AD-15295 | | | | 22 | | |
| AD-15373 | | | | 11 | | |
| AD-15163 | | | | 18 | | |
| AD-15165 | | | | 13 | | |
| AD-15374 | | | | 23 | | |
| AD-15296 | | | | 13 | | |
| AD-15261 | | | | 20 | | |
| AD-15375 | | | | 90 | | |
| AD-15262 | | | | 72 | | |
| AD-15376 | | | | 14 | | |
| AD-15377 | | | | 19 | | |
| AD-15409 | | | | 17 | | |
| AD-15378 | | | | 18 | | |
| AD-15410 | | | | 8 | | |
| AD-15379 | | | | 11 | | |
| AD-15187 | | | | 36 | | |
| AD-15263 | | | | 18 | | |
| AD-15264 | | | | 75 | | |
| AD-15297 | | | | 21 | | |
| AD-15208 | | | | 6 | | |
| AD-15209 | | | | 28 | | |
| AD-15193 | | | | 131 | | |
| AD-15380 | | | | 88 | | |
| AD-15298 | | | | 43 | | |
| AD-15299 | | | | 99 | | |
| AD-15265 | | | | 95 | | |
| AD-15381 | | | | 18 | | |
| AD-15210 | | | | 40 | | |
| AD-15270 | | | | 83 | | |
| AD-9591 | 75 | 95 | | | | |
| AD-9717 | | 105 | | | | |
| AD-9622 | | 94 | | | | |
| AD-9748 | | 103 | | | | |
| AD-9587 | | 63 | 49 | | | |
| AD-9713 | | 22 | 25 | | | 0.5 |
| AD-14679 | | | | 19 | | |
| AD-14689 | | | | 24 | | |
| AD-14699 | | | | 19 | | |
| AD-14709 | | | | 21 | | |
| AD-14719 | | | | 24 | | |
| AD-14729 | | | | 23 | | |
| AD-14739 | | | | 24 | | |
| AD-15085 | | | | 74 | | |
| AD-15095 | | | | 60 | | |
| AD-15105 | | | | 33 | | |
| AD-15115 | | | | 30 | | |
| AD-15125 | | | | 54 | | |
| AD-15135 | | | | 51 | | |
| AD-15145 | | | | 49 | | |
| AD-9578 | 49 | 61 | | | | |
| AD-9704 | | 111 | | | | |
| AD-9558 | | 66 | | | | |
| AD-9684 | | 63 | | | | |
| AD-9634 | | 29 | 30 | | | |
| AD-9760 | | 14 | 27 | | | |
| AD-15411 | | | | 5 | | |
| AD-15266 | | | | 23 | | |
| AD-15382 | | | | 12 | | |
| AD-9554 | | 23 | 24 | | | |
| AD-9680 | | 12 | 22 | | 0.1 | 0.1 |
| AD-14676 | | | | 12 | | .1 |
| AD-14686 | | | | 13 | | |
| AD-14696 | | | | 12 | | .1 |
| AD-14706 | | | | 18 | | .1 |
| AD-14716 | | | | 17 | | .1 |
| AD-14726 | | | | 16 | | .1 |
| AD-14736 | | | | 9 | | .1 |
| AD-15082 | | | | 27 | | |
| AD-15092 | | | | 28 | | |
| AD-15102 | | | | 19 | | |
| AD-15112 | | | | 17 | | |
| AD-15122 | | | | 56 | | |
| AD-15132 | | | | 39 | | |
| AD-15142 | | | | 46 | | |
| AD-9553 | | 27 | 22 | | 0.02 | |
| AD-9679 | | 17 | 21 | | | 0.1 |
| AD-14675 | | | | 11 | | |
| AD-14685 | | | | 19 | | |
| AD-14695 | | | | 12 | | |
| AD-14705 | | | | 16 | | |
| AD-14715 | | | | 19 | | |
| AD-14725 | | | | 19 | | |
| AD-14735 | | | | 19 | | |
| AD-15081 | | | | 30 | | |
| AD-15091 | | | | 16 | | |
| AD-15101 | | | | 16 | | |
| AD-15111 | | | | 11 | | |
| AD-15121 | | | | 19 | | |
| AD-15131 | | | | 17 | | |
| AD-15141 | | | | 18 | | |
| AD-9626 | | 97 | 68 | | | |
| AD-9752 | | 28 | 33 | | | |
| AD-9629 | | 23 | 24 | | | |
| AD-9755 | | 28 | 29 | | | 0.5 |
| AD-15412 | | | | 21 | | |
| AD-15211 | | | | 73 | | |
| AD-15300 | | | | 41 | | |

TABLE 2a
Sequences of modified dsRNA targeted to PCSK9

| | | SEQ | | SEQ |
|---|---|---|---|---|
| Duplex | | ID | | ID |
| number | Sense strand sequence (5′-3′)¹ | NO: | Antisense-strand sequence (5′-3′)¹ | NO: |
| AD-10792 | GccuGGAGuuuAuucGGAATsT | 1305 | UUCCGAAuAAACUCcAGGCTsT | 1306 |
| AD-10793 | GccuGGAGuuuAuucGGAATsT | 1307 | uUcCGAAuAAACUccAGGCTsT | 1308 |
| AD-10796 | GccuGGAGuuuAuucGGAATsT | 1309 | UUCCGAAUAAACUCCAGGCTsT | 1310 |
| AD-12038 | GccuGGAGuuuAuucGGAATsT | 1311 | uUCCGAAUAAACUCCAGGCTsT | 1312 |
| AD-12039 | GccuGGAGuuuAuucGGAATsT | 1313 | UuCCGAAUAAACUCCAGGCTsT | 1314 |
| AD-12040 | GccuGGAGuuuAuucGGAATsT | 1315 | UUcCGAAUAAACUCCAGGCTsT | 1316 |
| AD-12041 | GccuGGAGuuuAuucGGAATsT | 1317 | UUCcGAAUAAACUCCAGGCTsT | 1318 |
| AD-12042 | GCCUGGAGUUUAUUCGGAATsT | 1319 | uUCCGAAUAAACUCCAGGCTsT | 1320 |
| AD-12043 | GCCUGGAGUUUAUUCGGAATsT | 1321 | UuCCGAAUAAACUCCAGGCTsT | 1322 |
| AD-12044 | GCCUGGAGUUUAUUCGGAATsT | 1323 | UUcCGAAUAAACUCCAGGCTsT | 1324 |
| AD-12045 | GCCUGGAGUUUAUUCGGAATsT | 1325 | UUCcGAAUAAACUCCAGGCTsT | 1326 |
| AD-12046 | GccuGGAGuuuAuucGGAA | 1327 | UUCCGAAUAAACUCCAGGCscsu | 1328 |
| AD-12047 | GccuGGAGuuuAuucGGAAA | 1329 | UUUCCGAAUAAACUCCAGGCscsu | 1330 |
| AD-12048 | GccuGGAGuuuAuucGGAAAA | 1331 | UUUUCCGAAUAAACUCCAGGCscsu | 1332 |
| AD-12049 | GccuGGAGuuuAuucGGAAAAG | 1333 | CUUUUCCGAAUAAACUCCAGGCscsu | 1334 |
| AD-12050 | GccuGGAGuuuAuucGGAATTab | 1335 | UUCCGAAUAAACUCCAGGCTTab | 1336 |
| AD-12051 | GccuGGAGuuuAuucGGAAATTab | 1337 | UUUCCGAAuAAACUCCAGGCTTab | 1338 |
| AD-12052 | GccuGGAGuuuAuucGGAAAATTab | 1339 | UUUUCCGAAUAAACUCCAGGCTTab | 1340 |
| AD-12053 | GccuGGAGuuuAuucGGAAAAGTTab | 1341 | CUUUUCCGAAUAAACUCCAGGCTTab | 1342 |
| AD-12054 | GCCUGGAGUUUAUUCGGAATsT | 1343 | UUCCGAAUAAACUCCAGGCscsu | 1344 |
| AD-12055 | GccuGGAGuuuAuucGGAATsT | 1345 | UUCCGAAUAAACUCCAGGCscsu | 1346 |
| AD-12056 | GcCuGgAgUuUaUuCgGaA | 1347 | UUCCGAAUAAACUCCAGGCTTab | 1348 |
| AD-12057 | GcCuGgAgUuUaUuCgGaA | 1349 | UUCCGAAUAAACUCCAGGCTsT | 1350 |
| AD-12058 | GcCuGgAgUuUaUuCgGaA | 1351 | UUCCGAAuAAACUCcAGGCTsT | 1352 |
| AD-12059 | GcCuGgAgUuUaUuCgGaA | 1353 | uUcCGAAuAAACUccAGGCTsT | 1354 |
| AD-12060 | GcCuGgAgUuUaUuCgGaA | 1355 | UUCCGaaUAaaCUCCAggc | 1356 |
| AD-12061 | GcCuGgnAgUuUaUuCgGaATsT | 1357 | UUCCGaaUAaaCUCCAggcTsT | 1358 |
| AD-12062 | GcCuGgAgUuUaUuCgGaATTab | 1359 | UUCCGaaUAaaCUCCAggcTTab | 1360 |
| AD-12063 | GcCuGgAgUuUaUuCgGaA | 1361 | UUCCGaaUAaaCUCCAggcscsu | 1362 |
| AD-12064 | GcCuGgnAgUuUaUuCgGaATsT | 1363 | UUCCGAAuAAACUCcAGGCTsT | 1364 |
| AD-12065 | GcCuGgAgUuUaUuCgGaATTab | 1365 | UUCCGAAuAAACUCcAGGCTTab | 1366 |
| AD-12066 | GcCuGgAgUuUaUuCgGaA | 1367 | UUCCGAAuAAACUCcAGGCscsu | 1368 |
| AD-12067 | GcCuGgnAgUuUaUuCgGaATsT | 1369 | UUCCGAAUAAACUCCAGGCTsT | 1370 |
| AD-12068 | GcCuGgAgUuUaUuCgGaATTab | 1371 | UUCCGAAUAAACUCCAGGCTTab | 1372 |
| AD-12069 | GcCuGgAgUuUaUuCgGaA | 1373 | UUCCGAAUAAACUCCAGGCscsu | 1374 |
| AD-12338 | GfcCfuGfgAfgUfuUfaUfuCfgGfaAf | 1375 | P-uUfcCfgAfaUfaAfaCfuCfcAfgGfc | 1376 |
| AD-12339 | GcCuGgAgUuUaUuCgGaA | 1377 | P-uUfcCfgAfaUfaAfaCfuCfcAfgGfc | 1378 |
| AD-12340 | GccuGGAGuuuAuucGGAA | 1379 | P-uUfcCfgAfaUfaAfaCfuCfcAfgGfc | 1380 |
| AD-12341 | GfcCfuGfgAfgUfuUfaUfuCfgGfaAfTsT | 1381 | P-uUfcCfgAfaUfaAfaCfuCfcAfgGfcTsT | 1382 |
| AD-12342 | GfcCfuGfgAfgUfuUfaUfuCfgGfaAfTsT | 1383 | UUCCGAAuAAACUCcAGGCTsT | 1384 |
| AD-12343 | GfcCfuGfgAfgUfuUfaUfuCfgGfaAfTsT | 1385 | uUcCGAAuAAACUccAGGCTsT | 1386 |
| AD-12344 | GfcCfuGfgAfgUfuUfaUfuCfgGfaAfTsT | 1387 | UUCCGAAUAAACUCCAGGCTsT | 1388 |
| AD-12345 | GfcCfuGfgAfgUfuUfaUfuCfgGfaAfTsT | 1389 | UUCCGAAUAAACUCCAGGCscsu | 1390 |
| AD-12346 | GfcCfuGfgAfgUfuUfaUfuCfgGfaAfTsT | 1391 | UUCCGaaUAaaCUCCAggcscsu | 1392 |
| AD-12347 | GCCUGGAGUUUAUUCGGAATsT | 1393 | P-uUfcCfgAfaUfaAfaCfuCfcAfgGfcTsT | 1394 |
| AD-12348 | GccuGGAGuuuAuucGGAATsT | 1395 | P-uUfcCfgAfaUfaAfaCfuCfcAfgGfcTsT | 1396 |
| AD-12349 | GcCuGgnAgUuUaUuCgGaATsT | 1397 | P-uUfcCfgAfaUfaAfaCfuCfcAfgGfcTsT | 1398 |
| AD-12350 | GfcCfuGfgAfgUfuUfaUfuCfgGfaAfTTab | 1399 | P-uUfcCfgAfaUfaAfaCfuCfcAfgGfcTTab | 1400 |
| AD-12351 | GfcCfuGfgAfgUfuUfaUfuCfgGfaAf | 1401 | P-uUfcCfgAfaUfaAfaCfuCfcAfgGfcsCfsu | 1402 |
| AD-12352 | GfcCfuGfgAfgUfuUfaUfuCfgGfaAf | 1403 | UUCCGaaUAaaCUCCAggcscsu | 1404 |
| AD-12354 | GfcCfuGfgAfgUfuUfaUfuCfgGfaAf | 1405 | UUCCGAAUAAACUCCAGGCscsu | 1406 |
| AD-12355 | GfcCfuGfgAfgUfuUfaUfuCfgGfaAf | 1407 | UUCCGAAuAAACUCcAGGCTsT | 1408 |
| AD-12356 | GfcCfuGfgAfgUfuUfaUfuCfgGfaAf | 1409 | uUcCGAAuAAACUccAGGCTsT | 1410 |
| AD-12357 | GmocCmouGmogAm02gUmouUmoaUmouCm | 1411 | UUCCGaaUAaaCUCCAggc | 1412 |
| | ogGmoaA | | | |
| AD-12358 | GmocCmouGmogAm02gUmouUmoaUmouCm | 1413 | P-uUfcCfgAfaUfaAfaCfuCfcAfgGfc | 1414 |
| | ogGmoaA | | | |
| AD-12359 | GmocCmouGmogAm02gUmouUmoaUmouCm | 1415 | P-uUfcCfgAfaUfaAfaCfuCfcAfgGfcsCfsu | 1416 |
| | ogGmoaA | | | |
| AD-12360 | GmocCmouGmogAm02gUmouUmoaUmouCm | 1417 | UUCCGAAUAAACUCCAGGCscsu | 1418 |
| | ogGmoaA | | | |
| AD-12361 | GmocCmouGmogAm02gUmouUmoaUmouCm | 1419 | UUCCGAAUAAACUCcAGGCTsT | 1420 |
| | ogGmoaA | | | |
| AD-12362 | GmocCmouGmogAm02gUmouUmoaUmouCm | 1421 | uUcCGAAuAAACUccAGGCTsT | 1422 |
| | ogGmoaA | | | |
| AD-12363 | GmocCmouGmogAm02gUmouUmoaUmouCm | 1423 | UUCCGaaUAaaCUCCAggcscsu | 1424 |
| | ogGmoaA | | | |
| AD-12364 | GmocCmouGmogAmogUmouUmoaUmouCmo | 1425 | UUCCGaaUAaaCUCCAggcTsT | 1426 |
| | gGmoaATsT | | | |
| AD-12365 | GmocCmouGmogAmogUmouUmoaUmouCmo | 1427 | UUCCGAAUAAACUCcAGGCTsT | 1428 |
| | gGmoaATsT | | | |
| AD-12366 | GmocCmouGmogAmogUmouUmoaUmouCmo | 1429 | UUCCGAAUAAACUCCAGGCTsT | 1430 |
| | gGmoaATsT | | | |
| AD-12367 | GmocmocmouGGAGmoumoumouAmoumoum | 1431 | UUCCGaaUAaaCUCCAggcTsT | 1432 |
| | ocGGAATsT | | | |
| AD-12368 | GmocmocmouGGAGmoumoumouAmoumoum | 1433 | UUCCGAAUAAACUCcAGGCTsT | 1434 |
| | ocGGAATsT | | | |
| AD-12369 | GmocmocmouGGAGmoumoumouAmoumoum | 1435 | UUCCGAAUAAACUCCAGGCTsT | 1436 |
| | ocGGAATsT | | | |
| AD-12370 | GmocmocmouGGAGmoumoumouAmoumoum | 1437 | P-UfUfCfCfGAAUfAAACfUfCfCfAGGCfTsT | 1438 |
| | ocGGAATsT | | | |
| AD-12371 | GmocmocmouGGAGmoumoumouAmoumoum | 1439 | P-UfUfCfCfGAAUfAAACfUfCfCfAGGCfsCfsUf | 1440 |
| | ocGGAATsT | | | |
| AD-12372 | GmocmocmouGGAGmoumoumouAmoumoum | 1441 | P-uUfcCfgAfaUfaAfaCfuCfcAfgGfcsCfsu | 1442 |
| | ocGGAATsT | | | |
| AD-12373 | GmocmocmouGGAGmoumoumouAmoumoum | 1443 | UUCCGAAUAAACUCCAGGCTsT | 1444 |
| | ocGGAATsT | | | |
| AD-12374 | GCfCfUfGGAGUfUfUfAUfUfCfGGAATsT | 1445 | UfUfCfCfGAAUfAAACfUfCfCfAGGCfTsT | 1446 |
| AD-12375 | GCfCfUfGGAGUfUfUfAUfUfCfGGAATsT | 1447 | UUCCGAAUAAACUCCAGGCTsT | 1448 |
| AD-12377 | GCfCfUfGGAGUfUfUfAUfUfCfGGAATsT | 1449 | uUcCGAAuAAACUccAGGCTsT | 1450 |
| AD-12378 | GCfCfUfGGAGUfUfUfAUfUfCfGGAATsT | 1451 | UUCCGaaUAaaCUCCAggcscsu | 1452 |
| AD-12379 | GCfCfUfGGAGUfUfUfAUfUfCfGGAATsT | 1453 | UUCCGAAUAAACUCCAGGCscsu | 1454 |
| AD-12380 | GCfCfUfGGAGUfUfUfAUfUfCfGGAATsT | 1455 | P-uUfcCfgAfaUfaAfaCfuCfcAfgGfcsCfsu | 1456 |
| AD-12381 | GCfCfUfGGAGUfUfUfAUfUfCfGGAATsT | 1457 | P-uUfcCfgAfaUfaAfaCfuCfcAfgGfcTsT | 1458 |
| AD-12382 | GCfCfUfGGAGUfUfUfAUfUfCfGGAATsT | 1459 | P-UfUfCfCfGAAUfAAACfUfCfCfAGGCfTsT | 1460 |
| AD-12383 | GCCUGGAGUUUAUUCGGAATsT | 1461 | P-UfUfCfCfGAAUfAAACfUfCfCfAGGCfTsT | 1462 |
| AD-12384 | GccuGGAGuuuAuucGGAATsT | 1463 | P-UfUfCfCfGAAUfAAACfUfCfCfAGGCfTsT | 1464 |
| AD-12385 | GcCuGgnAgUuUaUuCgGaATsT | 1465 | P-UfUfCfCfGAAUfAAACfUfCfCfAGGCfTsT | 1466 |
| AD-12386 | GfcCfuGfgAfgUfuUfaUfuCfgGfaAf | 1467 | P-UfUfCfCfGAAUfAAACfUfCfCfAGGCfTsT | 1468 |
| AD-12387 | GCfCfUfGGAGGUfUfUfAUfUfCfGGAA | 1469 | UfUfCfCfGAAUfAAACfUfCfCfAGGCfsCfsUf | 1470 |
| AD-12388 | GCfCfUfGGAGGUfUfUfAUfUfCfGGAA | 1471 | P-uUfcCfgAfaUfaAfaCfuCfcAfgGfc | 1472 |
| AD-12389 | GCfCfUfGGAGGUfUfUfAUfUfCfGGAA | 1473 | P-uUfcCfgAfaUfaAfaCfuCfcAfgGfcsCfsu | 1474 |
| AD-12390 | GCfCfUfGGAGGUfUfUfAUfUfCfGGAA | 1475 | UUCCGAAUAAACUCCAGGCscsu | 1476 |
| AD-12391 | GCfCfUfGGAGGUfUfUfAUfUfCfGGAA | 1477 | UUCCGaaUAaaCUCCAggc | 1478 |
| AD-12392 | GCfCfUfGGAGGUfUfUfAUfUfCfGGAA | 1479 | UUCCGAAUAAACUCCAGGCTsT | 1480 |
| AD-12393 | GCfCfUfGGAGGUfUfUfAUfUfCfGGAA | 1481 | UUCCGAAuAAACUCcAGGCTsT | 1482 |
| AD-12394 | GCfCfUfGGAGGUfUfUfAUfUfCfGGAA | 1483 | uUcCGAAuAAACUccAGGCTsT | 1484 |
| AD-12395 | GmocCmouGmogAmogUmouUmoaUmouCmo | 1485 | P-UfUfCfCfGAAUfAAACfUfCfCfAGGCfsCfsUf | 1486 |
| | gGmoaATsT | | | |
| AD-12396 | GmocCmouGmogAm02gUmouUmoaUmouCm | 1487 | P-UfUfCfCfGAAUfAAACfUfCfCfAGGCfsCfsUf | 1488 |
| | ogGmoaA | | | |
| AD-12397 | GfcCfuGfgAfgUfuUfaUfuCfgGfaAf | 1489 | P-UfUfCfCfGAAUfAAACfUfCfCfAGGCfsCfsUf | 1490 |
| AD-12398 | GfcCfuGfgAfgUfuUfaUfuCfgGfaAfTsT | 1491 | P-UfUfCfCfGAAUfAAACfUfCfCfAGGCfsCfsUf | 1492 |
| AD-12399 | GcCuGgnAgUuUaUuCgGaATsT | 1493 | P-UfUfCfCfGAAUfAAACfUfCfCfAGGCfsCfsUf | 1494 |
| AD-12400 | GCCUGGAGUUUAUUCGGAATsT | 1495 | P-UfUfCfCfGAAUfAAACfUfCfCfAGGCfsCfsUf | 1496 |
| AD-12401 | GccuGGAGuuuAuucGGAATsT | 1497 | P-UfUfCfCfGAAUfAAACfUfCfCfAGGCfsCfsUf | 1498 |
| AD-12402 | GccuGGAGuuuAuucGGAA | 1499 | P-UfUfCfCfGAAUfAAACfUfCfCfAGGCfsCfsUf | 1500 |
| AD-12403 | GCfCfUfGGAGGUfUfUfAUfUfCfGGAA | 1501 | P-UfUfCfCfGAAUfAAACfUfCfCfAGGCfsCfsUf | 1502 |
| AD-9314 | GCCUGGAGUUUAUUCGGAATsT | 1503 | UUCCGAAUAAACUCCAGGCTsT | 1504 |
| AD-10794 | ucAuAGGccuGGAGuuuAudTsdT | 1525 | AuAAACUCcAGGCCuAUGAdTsdT | 1526 |
| AD-10795 | ucAuAGGccuGGAGuuuAudTsdT | 1527 | AuAAACUccAGGcCuAuGAdTsdT | 1528 |
| AD-10797 | ucAuAGGccuGGAGuuuAudTsdT | 1529 | AUAAACUCCAGGCCUAUGAdTsdT | 1530 |

U, C, A, G: corresponding ribonucleotide; T: deoxythymidine; u, c, a, g: corresponding 2′-O-methyl ribonucleotide; Uf, Cf, Af, Gf: corresponding 2′-deoxy-2′-fluoro ribonucleotide; moc, mou, mog, moa: corresponding 2′-MOE nucleotide; where nucleotides are written in sequence, they are connected by 3′-5′ phosphodiester groups; ab: 3′-terminal abasic nucleotide; nucleotides with interjected “s” are connected by 3′-O-5′-O phosphorothiodiester groups; unless denoted by prefix “p-”, oligonucleotides are devoid of a 5′-phosphate group on the 5′-most nucleotide; all oligonucleotides bear 3′-OH on the 3′-most nucleotide

TABLE 2b
Screening of dsRNAs targeted to PCSK9

| | Remaining mRNA in |
|---|---|
| | % of controls at |
| Duplex number | siRNA conc. of 30 nM |
| AD-10792 | 15 |
| AD-10793 | 32 |
| AD-10796 | 13 |
| AD-12038 | 13 |
| AD-12039 | 29 |
| AD-12040 | 10 |
| AD-12041 | 11 |
| AD-12042 | 12 |
| AD-12043 | 13 |
| AD-12044 | 7 |
| AD-12045 | 8 |
| AD-12046 | 13 |
| AD-12047 | 17 |
| AD-12048 | 43 |
| AD-12049 | 34 |
| AD-12050 | 16 |
| AD-12051 | 31 |
| AD-12052 | 81 |
| AD-12053 | 46 |
| AD-12054 | 8 |
| AD-12055 | 13 |
| AD-12056 | 11 |
| AD-12057 | 8 |
| AD-12058 | 9 |
| AD-12059 | 23 |
| AD-12060 | 10 |
| AD-12061 | 7 |
| AD-12062 | 10 |
| AD-12063 | 19 |
| AD-12064 | 15 |
| AD-12065 | 16 |
| AD-12066 | 20 |
| AD-12067 | 17 |
| AD-12068 | 18 |
| AD-12069 | 13 |
| AD-12338 | 15 |
| AD-12339 | 14 |
| AD-12340 | 19 |
| AD-12341 | 12 |
| AD-12342 | 13 |
| AD-12343 | 24 |
| AD-12344 | 9 |
| AD-12345 | 12 |
| AD-12346 | 13 |
| AD-12347 | 11 |
| AD-12348 | 8 |
| AD-12349 | 11 |
| AD-12350 | 17 |
| AD-12351 | 11 |
| AD-12352 | 11 |
| AD-12354 | 11 |
| AD-12355 | 9 |
| AD-12356 | 25 |
| AD-12357 | 56 |
| AD-12358 | 29 |
| AD-12359 | 30 |
| AD-12360 | 15 |
| AD-12361 | 20 |
| AD-12362 | 51 |
| AD-12363 | 11 |
| AD-12364 | 25 |
| AD-12365 | 18 |
| AD-12366 | 23 |
| AD-12367 | 42 |
| AD-12368 | 40 |
| AD-12369 | 26 |
| AD-12370 | 68 |
| AD-12371 | 60 |
| AD-12372 | 60 |
| AD-12373 | 55 |
| AD-12374 | 9 |
| AD-12375 | 16 |
| AD-12377 | 88 |
| AD-12378 | 6 |
| AD-12379 | 6 |
| AD-12380 | 8 |
| AD-12381 | 10 |
| AD-12382 | 7 |
| AD-12383 | 7 |
| AD-12384 | 8 |
| AD-12385 | 8 |
| AD-12386 | 11 |
| AD-12387 | 13 |
| AD-12388 | 19 |
| AD-12389 | 16 |
| AD-12390 | 17 |
| AD-12391 | 21 |
| AD-12392 | 28 |
| AD-12393 | 17 |
| AD-12394 | 75 |
| AD-12395 | 55 |
| AD-12396 | 59 |
| AD-12397 | 20 |
| AD-12398 | 11 |
| AD-12399 | 13 |
| AD-12400 | 12 |
| AD-12401 | 13 |
| AD-12402 | 14 |
| AD-12403 | 4 |
| AD-9314 | 9 |

TABLE 3
Cholesterol levels of rats treated with LNP01-10792
Dosage of 5 mg/kg, n = 6 rats per group

| Day | Total serum cholesterol (relative to PBS control) |
|---|---|
| 2 | 0.329 ± 0.035 |
| 4 | 0.350 ± 0.055 |
| 7 | 0.402 ± 0.09 |
| 9 | 0.381 ± 0.061 |
| 11 | 0.487 ± 0.028 |
| 14 | 0.587 ± 0.049 |
| 16 | 0.635 ± 0.107 |
| 18 | 0.704 ± 0.060 |
| 21 | 0.775 ± 0.102 |
| 28 | 0.815 ± 0.103 |

TABLE 4
Serum LDL-C levels of cynomolgus monkeys treated with LNP
formulated dsRNAs

| | Serum LDL-C (relative to | | | | | |
|---|---|---|---|---|---|---|
| | pre-dose) | | | | | |
| | Day 3 | Day 4 | Day 5 | Day 7 | Day 14 | Day 21 |
| PBS | 1.053 ± 0.158 | 0.965 ± 0.074 | 1.033 ± 0.085 | 1.033 ± 0.157 | 1.009 ± 0.034 | |
| n = 3 | | | | | | |
| LNP01-1955 | | 1.027 ± 0.068 | | 1.104 ± 0.114 | | |
| n = 3 | | | | | | |
| LNP01-10792 | 0.503 ± 0.055 | 0.596 ± 0.111 | 0.674 ± 0.139 | 0.644 ± 0.121 | 0.958 ± 0.165 | 1.111 ± 0.172 |
| n = 5 | | | | | | |
| LNP01-9680 | 0.542 ± 0.155 | 0.437 ± 0.076 | 0.505 ± 0.071 | 0.469 ± 0.066 | 0.596 ± 0.080 | 0.787 ± 0.138 |
| n = 4 | | | | | | |

TABLE 5a
Modified dsRNA targeted to PCSK9

| | Position | | | | SEQ |
|---|---|---|---|---|---|
| | in human | | | | ID |
| Name | access. # | Sense | Antisense | Sequence 5′-3′ | NO: |
| AD- | 1091 | unmodified | unmodified | GCCUGGAGUUUAUUCGGAAdTdT | 1505 |
| 1a1 | | | | UUCCGAAUAAACUCCAGGCdTsdT | 1506 |
| AD- | 1091 | 2′OMe | 2′OMe | GccuGGAGuuuAuucGGAAdTsdT | 1507 |
| 1a2 | | | | UUCCGAAuAAACUCcAGGCdTsdT | 1508 |
| AD- | 1091 | Alt 2′F, | Alt 2′F, | GfcCfuGfgAfgUfuUfaUfuCfgGfaAfdTdT | 1509 |
| 1a3 | | 2′OMe | 2′OMe | puUfcCfgAfaUfaAfaCfuCfcAfgGfcdTsdT | 1510 |
| AD- | 1091 | 2′OMe | 2′F all Py, | GccuGGAGuuuAuucGGAAdTsdT | 1511 |
| 1a4 | | | 5′Phosphate | PUfUfCfCfGAAUfAAACfUfCfCfAGGCfdTsdT | 1512 |
| AD- | 1091 | 2′F | 2′F all Py, | GCfCfUfGGAGUfUfUfAUfUfCfGGAAdTsdT | 1513 |
| 1a5 | | | 5′Phosphate | PUfUfCfCfGAAUfAAACfUfCfCfAGGCfdTsdT | 1514 |
| AD- | 3530 | 2′OMe | 2′OMe | uucuAGAccuGuuuuGcuudTsdT | 1515 |
| 2a1 | (3′UTR) | | | AAGcAAAAcAGGUCuAGAAdTsdT | 1516 |
| AD- | 833 | 2′OMe | 2′OMe | AGGuGuAucuccuAGAcAcdTsdT | 1517 |
| 3a1 | | | | GUGUCuAGGAGAuAcACCUdTsdT | 1518 |
| AD- | N/A | 2′OMe | 2′OMe | cuuAcGcuGAGuAcuucGAdTsdT | 1519 |
| ctrl | | | | UCGAAGuACUcAGCGuAAGdTsdT | 1520 |
| (Luc.) | | | | | |

U, C, A, G: corresponding ribonucleotide; T: deoxythymidine; u, c, a, g: corresponding 2′-O-methyl ribonucleotide; Uf, Cf, Af, Gf: corresponding 2′-deoxy-2′-fluoro ribonucleotide; where nucleotides are written in sequence, they are connected by 3′-5′ phosphodiester groups; nucleotides with interjected “s” are connected by 3′-O-5′-O phosphorothiodiester groups; unless denoted by prefix “p-”, oligonucleotides are devoid of a 5′-phosphate group on the 5′-most nucleotide; all oligonucleotides bear 3′-OH on the 3′-most nucleotide.

TABLE 5b
Silencing activity of modified dsRNA in monkey hepatocytes

| | | | | | Primary |
|---|---|---|---|---|---|
| | Position in | IFN-α/ | | | Cynomolgus Monkey |
| | human | TNF-α | | | Hepatocytes |
| Name | access.# | Induction | Sense | Antisense | ~IC50, nM |
| AD-1a1 | 1091 | Yes/Yes | unmodified | unmodified | 0.07-0.2 |
| AD-1a2 | 1091 | No/No | 2′OMe | 2′OMe | 0.07-0.2 |
| AD-1a3 | 1091 | No/No | Alt 2′F, | Alt 2′F, 2′OMe | 0.07-0.2 |
| | | | 2′OMe | | |
| AD-1a4 | 1091 | No/No | 2′OMe | 2′F all Py, | 0.07-0.2 |
| | | | | 5′Phosphate | |
| AD-1a5 | 1091 | No/No | 2′F | 2′F all Py, | 0.07-0.2 |
| | | | | 5′Phosphate | |
| AD-2a1 | 3530 | No/No | 2′OMe | 2′OMe | 0.07-0.2 |
| | (3′UTR) | | | | |
| AD-3a1 | 833 | No/No | 2′OMe | 2′OMe | 0.1-0.3 |
| AD-ctrl | N/A | No/No | 2′OMe | 2′OMe | N/A |
| (Luc.) | | | | | |

TABLE 6
dsRNA targeted to PCSK9: mismatches and
modifications

| | | SEQ | |
|---|---|---|---|
| Duplex | | ID | |
| # | Strand | NO: | Sequence 5′ to 3′ |
| AD-9680 | S | 1531 | uucuAGAccuGuuuuGcuudTsdT |
| | AS | 1532 | AAGcAAAAcAGGUCuAGAAdTsdT |
| AD-3267 | S | 1535 | uucuAGAcCuGuuuuGcuuTsT |
| | AS | 1536 | AAGcAAAAcAGGUCuAGAATsT |
| AD-3268 | S | 1537 | uucuAGAccUGuuuuGcuuTsT |
| | AS | 1538 | AAGcAAAAcAGGUCuAGAATsT |
| AD-3269 | S | 1539 | uucuAGAcCUGuuuuGcuuTsT |
| | AS | 1540 | AAGcAAAAcAGGUCuAGAATsT |
| AD-3270 | S | 1541 | uucuAGAcY1uGuuuuGcuuTsT |
| | AS | 1542 | AAGcAAAAcAGGUCuAGAATsT |
| AD-3271 | S | 1543 | uucuAGAcY1UGuuuuGcuuTsT |
| | AS | 1544 | AAGcAAAAcAGGUCuAGAATsT |
| AD-3272 | S | 1545 | uucuAGAccY1GuuuuGcuuTsT |
| | AS | 1546 | AAGcAAAAcAGGUCuAGAATsT |
| AD-3273 | S | 1547 | uucuAGAcCY1GuuuuGcuuTsT |
| | AS | 1548 | AAGcAAAAcAGGUCuAGAATsT |
| AD-3274 | S | 1549 | uucuAGAccuY1uuuuGcuuTsT |
| | AS | 1550 | AAGcAAAAcAGGUCuAGAATsT |
| AD-3275 | S | 1551 | uucuAGAcCUY1uuuuGcuuTsT |
| | AS | 1552 | AAGcAAAAcAGGUCuAGAATsT |
| AD-14676 | S | 1553 | UfuCfuAfgAfcCfuGfuUfuUfgCfuUfT |
| | | | sT |
| | AS | 1554 | p-aAfgCfaAfaAfcAfgGfuCfuAfgAfaT |
| | | | sT |
| AD-3276 | S | 1555 | UfuCfuAfgAfcCuGfuUfuUfgCfuUfTsT |
| | AS | 1556 | p-aAfgCfaAfaAfcAfgGfuCfuAfgAfaT |
| | | | sT |
| AD-3277 | S | 1557 | UfuCfuAfgAfcCfUGfuUfuUfgCfuUfT |
| | | | sT |
| | AS | 1558 | p-aAfgCfaAfaAfcAfgGfuCfuAfgAfaT |
| | | | sT |
| AD-3278 | S | 1559 | UfuCfuAfgAfcCUGfuUfuUfgCfuUfTsT |
| | AS | 1560 | p-aAfgCfaAfaAfcAfgGfuCfuAfgAfaT |
| | | | sT |
| AD-3279 | S | 1561 | UfuCfuAfgAfcY1uGfuUfuUfgCfuUfT |
| | | | sT |
| | AS | 1562 | p-aAfgCfaAfaAfcAfgGfuCfuAfgAfaT |
| | | | sT |
| AD-3280 | S | 1563 | UfuCfuAfgAfcY1UGfuUfuUfgCfuUfT |
| | | | sT |
| | AS | 1564 | p-aAfgCfaAfaAfcAfgGfuCfuAfgAfaT |
| | | | sT |
| AD-3281 | S | 1565 | UfuCfuAfgAfcCfY1GfuUfuUfgCfuUfT |
| | | | sT |
| | AS | 1566 | p-aAfgCfaAfaAfcAfgGfuCfuAfgAfaT |
| | | | sT |
| AD-3282 | S | 1567 | UfuCfuAfgAfcCY1GfuUfuUfgCfuUfT |
| | | | sT |
| | AS | 1568 | p-aAfgCfaAfaAfcAfgGfuCfuAfgAfaT |
| | | | sT |
| AD-3283 | S | 1569 | UfuCfuAfgAfcCfuY1uUfuUfgCfuUtT |
| | | | sT |
| | AS | 1570 | p-aAfgCfaAfaAfcAfgGfuCfuAfgAfaT |
| | | | sT |
| AD-3284 | S | 1571 | UfuCfuAfgAfcCUY1uUfuUfgCfuUfTsT |
| | AS | 1572 | p-aAfgCfaAfaAfcAfgGfuCfuAfgAfaT |
| | | | sT |

Strand: S/Sense; AS/Antisense
U, C, A, G: corresponding ribonucleotide; T: deoxythymidine; u, c, a, g: corresponding 2′-O-methyl ribonucleotide; Uf, Cf, Af, Gf: corresponding 2′-deoxy-2′-fluoro ribonucleotide; Y1 corresponds to DFT difluorotoluyl ribo(or deoxyribo)nucleotide; where nucleotides are written in sequence, they are connected by 3′-5′ phosphodiester groups; nucleotides with interjected “s” are connected by 3′-O-5′-O phosphorothiodiester groups; unless denoted by prefix “p-”, oligonucleotides are devoid of a 5′-phosphate group on the 5′-most nucleotide; all oligonucleotides bear 3′-OH on the 3′-most nucleotide

1. A method for inhibiting expression of a PCSK9 gene in a subject, the method comprising administering a first dose of a dsRNA targeted to the PCSK9 gene and after a time interval optionally administering a second dose of the dsRNA wherein the time interval is not less than 7 days.

2. The method of claim 1, wherein the method inhibits PCSK9 gene expression by at least 40% or by at least 30%.

3. The method of claim 1, wherein said method lowers serum LDL cholesterol in the subject.

4. The method of claim 1, wherein said method lowers serum LDL cholesterol in the subject for at least 7 days, at least 14 days, or at least 21 days.

5. The method of claim 1, wherein said method lowers serum LDL cholesterol in the subject by at least 30%.

6. The method of claim 1, wherein said method lowers serum LDL cholesterol within 2 days or within 3 days or within 7 days of administration of the first dose.

7. The method of claim 1, wherein said method lowers serum LDL cholesterol by at least 30% within 3 days.

8. The method of claim 1, wherein circulating serum ApoB levels are reduced or HDLc levels are stable or triglyceride levels are stable.

9. The method of claim 1, wherein said method lowers total serum cholesterol in the subject.

10. The method of claim 1, wherein said method lowers total cholesterol in the subject for at least 7 days, at least 10 days, at least 14 days, or at least 21 days.

11. The method of claim 1, wherein said method lowers total cholesterol in the subject by at least 30%.

12. The method of claim 1, wherein said method lowers total cholesterol within 2 days or within 3 days or within 7 days of administration.

13. The method of claim 1, comprising a single administration of the dsRNA.

14. The method of claim 1, wherein the method increases LDL receptor (LDLR) levels.

15. The method of claim 1, wherein the method does not result in a change in liver triglyceride levels or liver cholesterol levels.

16. The method of claim 1 wherein the dsRNA is a dsRNA described in Table 1a, Table 2a, Table 5a, or Table 6 or AD-3511.

17. The method of claim 1, wherein the PCSK9 target is SEQ ID NO:1523.

18. The method of claim 1, wherein the dsRNA comprises a sense strand comprising at least one internal mismatch to SEQ ID NO:1523.

19. The method of claim 1, wherein the dsRNA comprises a sense strand consisting of SEQ ID NO:1227 and the antisense strand consists of SEQ ID NO:1228.

20. The method of claim 1, wherein the dsRNA is ALDP-9680.

21. The method of claim 1, wherein the dsRNA is targeted to SEQ ID NO:1524.

22. The method of claim 1, wherein the dsRNA comprises a sense strand comprising at least one internal mismatch to SEQ ID NO:1524.

23. The method of claim 1, wherein the dsRNA comprises a sense strand consisting of SEQ ID NO:457 and the antisense strand consists of SEQ ID NO:458.

24. The method of claim 1, wherein the dsRNA is ALDP-10792.

25. The method of claim 1, wherein the dsRNA comprises an antisense strand substantially complementary to less than 30 consecutive nucleotides of an mRNA encoding PCSK9.

26. The method of claim 1, wherein the dsRNA comprises an antisense strand substantially complementary to 19-24 nucleotides of an mRNA encoding PCSK9.

27. The method of claim 1, wherein each strand of the dsRNA is 19, 20, 21, 22, 23, or 24 nucleotides in length.

28. The method of claim 1, wherein at least one strand of the dsRNA includes at least one additional modified nucleotide.

29. The method of claim 1, wherein at least one strand of the dsRNA includes at least one modified nucleotide selected from the group consisting of a 2′-O-methyl modified nucleotide, a nucleotide having a 5′-phosphorothioate group, a terminal nucleotide linked to a cholesteryl derivative, a 2′-deoxy-2′-fluoro modified nucleotide, a 2′-deoxy-modified nucleotide, a locked nucleotide, an abasic nucleotide, a 2′-amino-modified nucleotide, a 2′-alkyl-modified nucleotide, a morpholino nucleotide, a phosphoramidate, and a non-natural base comprising nucleotide.

30. The method of claim 1, wherein the dsRNA is conjugated to a ligand.

31. The method of claim 1, wherein the dsRNA is conjugated to an agent which facilitates uptake across liver cells.

32. The method of claim 1, wherein the dsRNA is conjugated to an agent which facilitates uptake across liver cells and the agent comprises Chol-p-(GalNAc)₃ (N-acetyl galactosamine cholesterol) or LCO(GalNAc)₃ (N-acetyl galactosamine-3′-Lithocholic-oleoyl.

33. The method of claim 1, wherein the dsRNA is administered in a lipid formulation.

34. The method of claim 1, wherein the dsRNA is administered in a LNP or a SNALP formulation.

35. The method of claim 1, wherein the first or second dose of the dsRNA is administered at about 0.01, 0.1, 0.5, 1.0, 2.5, or 5 mg/kg.

36. The method of claim 1, wherein the subject is a primate.

37. The method of claim 1, wherein the subject is a human.

38. The method of claim 1, wherein the subject is a hyperlipidemic human.

39. The method of claim 1 wherein the dsRNA is administered subdermally or subcutaneously or intravenously.

40. The method of claim 1 wherein a second compound is co-administered with the dsRNA.

41. The method of claim 40, wherein the second compound is selected from the group consisting of an agent for treating hypercholesterolemia, atherosclerosis and dyslipidemia.

42. The method of claim 40, wherein the second compound comprises a statin.

43. A composition comprising any of the isolated dsRNA described in Table 6 or AD3511.

44.-50. (canceled)

The application's sequence listing, which the Patent Office published only in electronic form, follows.

SEQUENCE LISTING (1570 sequences)

SEQ ID NO: 1 - DNA, 21 bp, Artificial Sequence
  Description of Combined DNA/RNA Molecule: Synthetic oligonucleotide
  Description of Artificial Sequence: Synthetic oligonucleotide
agcgacgucgaggcgcucatt

SEQ ID NO: 2 - DNA, 21 bp, Artificial Sequence
  Description of Combined DNA/RNA Molecule: Synthetic oligonucleotide
  Description of Artificial Sequence: Synthetic oligonucleotide
ugagcgccucgacgucgcutt

SEQ ID NO: 3 - DNA, 21 bp, Artificial Sequence
  Description of Combined DNA/RNA Molecule: Synthetic oligonucleotide
  Description of Artificial Sequence: Synthetic oligonucleotide
cgcucaugguugcaggcggtt

SEQ ID NO: 4 - DNA, 21 bp, Artificial Sequence
  Description of Combined DNA/RNA Molecule: Synthetic oligonucleotide
  Description of Artificial Sequence: Synthetic oligonucleotide
ccgccugcaaccaugagcgtt

SEQ ID NO: 5 - DNA, 21 bp, Artificial Sequence
  Description of Combined DNA/RNA Molecule: Synthetic oligonucleotide
  Description of Artificial Sequence: Synthetic oligonucleotide
gcucaugguugcaggcgggtt

SEQ ID NO: 6 - DNA, 21 bp, Artificial Sequence
  Description of Combined DNA/RNA Molecule: Synthetic oligonucleotide
  Description of Artificial Sequence: Synthetic oligonucleotide
cccgccugcaaccaugagctt

SEQ ID NO: 7 - DNA, 21 bp, Artificial Sequence
  Description of Combined DNA/RNA Molecule: Synthetic oligonucleotide
  Description of Artificial Sequence: Synthetic oligonucleotide
gcgggcgccgccguucagutt

SEQ ID NO: 8 - DNA, 21 bp, Artificial Sequence
  Description of Combined DNA/RNA Molecule: Synthetic oligonucleotide
  Description of Artificial Sequence: Synthetic oligonucleotide
acugaacggcggcgcccgctt

SEQ ID NO: 9 - DNA, 21 bp, Artificial Sequence
  Description of Combined DNA/RNA Molecule: Synthetic oligonucleotide
  Description of Artificial Sequence: Synthetic oligonucleotide
cgggcgccgccguucaguutt

SEQ ID NO: 10 - DNA, 21 bp, Artificial Sequence
  Description of Combined DNA/RNA Molecule: Synthetic oligonucleotide
  Description of Artificial Sequence: Synthetic oligonucleotide
aacugaacggcggcgcccgtt

SEQ ID NO: 11 - DNA, 21 bp, Artificial Sequence
  Description of Combined DNA/RNA Molecule: Synthetic oligonucleotide
  Description of Artificial Sequence: Synthetic oligonucleotide
gggcgccgccguucaguuctt

SEQ ID NO: 12 - DNA, 21 bp, Artificial Sequence
  Description of Combined DNA/RNA Molecule: Synthetic oligonucleotide
  Description of Artificial Sequence: Synthetic oligonucleotide
gaacugaacggcggcgccctt

SEQ ID NO: 13 - DNA, 21 bp, Artificial Sequence
  Description of Combined DNA/RNA Molecule: Synthetic oligonucleotide
  Description of Artificial Sequence: Synthetic oligonucleotide
ccguucaguucagggucugtt

SEQ ID NO: 14 - DNA, 21 bp, Artificial Sequence
  Description of Combined DNA/RNA Molecule: Synthetic oligonucleotide
  Description of Artificial Sequence: Synthetic oligonucleotide
cagacccugaacugaacggtt

SEQ ID NO: 15 - DNA, 21 bp, Artificial Sequence
  Description of Combined DNA/RNA Molecule: Synthetic oligonucleotide
  Description of Artificial Sequence: Synthetic oligonucleotide
uucaguucagggucugagctt

SEQ ID NO: 16 - DNA, 21 bp, Artificial Sequence
  Description of Combined DNA/RNA Molecule: Synthetic oligonucleotide
  Description of Artificial Sequence: Synthetic oligonucleotide
gcucagacccugaacugaatt

SEQ ID NO: 17 - DNA, 21 bp, Artificial Sequence
  Description of Combined DNA/RNA Molecule: Synthetic oligonucleotide
  Description of Artificial Sequence: Synthetic oligonucleotide
gugagacuggcucgggcggtt

SEQ ID NO: 18 - DNA, 21 bp, Artificial Sequence
  Description of Combined DNA/RNA Molecule: Synthetic oligonucleotide
  Description of Artificial Sequence: Synthetic oligonucleotide
ccgcccgagccagucucactt

SEQ ID NO: 19 - DNA, 21 bp, Artificial Sequence
  Description of Combined DNA/RNA Molecule: Synthetic oligonucleotide
  Description of Artificial Sequence: Synthetic oligonucleotide
ggccgggacgcgucguugctt

SEQ ID NO: 20 - DNA, 21 bp, Artificial Sequence
  Description of Combined DNA/RNA Molecule: Synthetic oligonucleotide
  Description of Artificial Sequence: Synthetic oligonucleotide
gcaacgacgcgucccggcctt

SEQ ID NO: 21 - DNA, 21 bp, Artificial Sequence
  Description of Combined DNA/RNA Molecule: Synthetic oligonucleotide
  Description of Artificial Sequence: Synthetic oligonucleotide
gccgggacgcgucguugcatt

SEQ ID NO: 22 - DNA, 21 bp, Artificial Sequence
  Description of Combined DNA/RNA Molecule: Synthetic oligonucleotide
  Description of Artificial Sequence: Synthetic oligonucleotide
ugcaacgacgcgucccggctt

SEQ ID NO: 23 - DNA, 21 bp, Artificial Sequence
  Description of Combined DNA/RNA Molecule: Synthetic oligonucleotide
  Description of Artificial Sequence: Synthetic oligonucleotide
ccgggacgcgucguugcagtt

SEQ ID NO: 24 - DNA, 21 bp, Artificial Sequence
  Description of Combined DNA/RNA Molecule: Synthetic oligonucleotide
  Description of Artificial Sequence: Synthetic oligonucleotide
cugcaacgacgcgucccggtt

SEQ ID NO: 25 - DNA, 21 bp, Artificial Sequence
  Description of Combined DNA/RNA Molecule: Synthetic oligonucleotide
  Description of Artificial Sequence: Synthetic oligonucleotide
ggacgcgucguugcagcagtt

SEQ ID NO: 26 - DNA, 21 bp, Artificial Sequence
  Description of Combined DNA/RNA Molecule: Synthetic oligonucleotide
  Description of Artificial Sequence: Synthetic oligonucleotide
cugcugcaacgacgcgucctt

SEQ ID NO: 27 - DNA, 21 bp, Artificial Sequence
  Description of Combined DNA/RNA Molecule: Synthetic oligonucleotide
  Description of Artificial Sequence: Synthetic oligonucleotide
ucccagccaggauuccgcgtt

SEQ ID NO: 28 - DNA, 21 bp, Artificial Sequence
  Description of Combined DNA/RNA Molecule: Synthetic oligonucleotide
  Description of Artificial Sequence: Synthetic oligonucleotide
cgcggaauccuggcugggatt

SEQ ID NO: 29 - DNA, 21 bp, Artificial Sequence
  Description of Combined DNA/RNA Molecule: Synthetic oligonucleotide
  Description of Artificial Sequence: Synthetic oligonucleotide
ucccagccaggauuccgcgtt

SEQ ID NO: 30 - DNA, 21 bp, Artificial Sequence
  Description of Combined DNA/RNA Molecule: Synthetic oligonucleotide
  Description of Artificial Sequence: Synthetic oligonucleotide
cgcggaauccuggcugggatt

SEQ ID NO: 31 - DNA, 21 bp, Artificial Sequence
  Description of Combined DNA/RNA Molecule: Synthetic oligonucleotide
  Description of Artificial Sequence: Synthetic oligonucleotide
cccagccaggauuccgcgctt

SEQ ID NO: 32 - DNA, 21 bp, Artificial Sequence
  Description of Combined DNA/RNA Molecule: Synthetic oligonucleotide
  Description of Artificial Sequence: Synthetic oligonucleotide
gcgcggaauccuggcugggtt

SEQ ID NO: 33 - DNA, 21 bp, Artificial Sequence
  Description of Combined DNA/RNA Molecule: Synthetic oligonucleotide
  Description of Artificial Sequence: Synthetic oligonucleotide
cccagccaggauuccgcgctt

SEQ ID NO: 34 - DNA, 21 bp, Artificial Sequence
  Description of Combined DNA/RNA Molecule: Synthetic oligonucleotide
  Description of Artificial Sequence: Synthetic oligonucleotide
gcgcggaauccuggcugggtt

SEQ ID NO: 35 - DNA, 21 bp, Artificial Sequence
  Description of Combined DNA/RNA Molecule: Synthetic oligonucleotide
  Description of Artificial Sequence: Synthetic oligonucleotide
cagccaggauuccgcgcgctt

SEQ ID NO: 36 - DNA, 21 bp, Artificial Sequence
  Description of Combined DNA/RNA Molecule: Synthetic oligonucleotide
  Description of Artificial Sequence: Synthetic oligonucleotide
gcgcgcggaauccuggcugtt

SEQ ID NO: 37 - DNA, 21 bp, Artificial Sequence
  Description of Combined DNA/RNA Molecule: Synthetic oligonucleotide
  Description of Artificial Sequence: Synthetic oligonucleotide
cagccaggauuccgcgcgctt

SEQ ID NO: 38 - DNA, 21 bp, Artificial Sequence
  Description of Combined DNA/RNA Molecule: Synthetic oligonucleotide
  Description of Artificial Sequence: Synthetic oligonucleotide
gcgcgcggaauccuggcugtt

SEQ ID NO: 39 - DNA, 21 bp, Artificial Sequence
  Description of Combined DNA/RNA Molecule: Synthetic oligonucleotide
  Description of Artificial Sequence: Synthetic oligonucleotide
agcuccugcacaguccucctt

SEQ ID NO: 40 - DNA, 21 bp, Artificial Sequence
  Description of Combined DNA/RNA Molecule: Synthetic oligonucleotide
  Description of Artificial Sequence: Synthetic oligonucleotide
ggaggacugugcaggagcutt

SEQ ID NO: 41 - DNA, 21 bp, Artificial Sequence
  Description of Combined DNA/RNA Molecule: Synthetic oligonucleotide
  Description of Artificial Sequence: Synthetic oligonucleotide
agcuccugcacaguccucctt

SEQ ID NO: 42 - DNA, 21 bp, Artificial Sequence
  Description of Combined DNA/RNA Molecule: Synthetic oligonucleotide
  Description of Artificial Sequence: Synthetic oligonucleotide
ggaggacugugcaggagcutt

SEQ ID NO: 43 - DNA, 21 bp, Artificial Sequence
  Description of Combined DNA/RNA Molecule: Synthetic oligonucleotide
  Description of Artificial Sequence: Synthetic oligonucleotide
caccgcaaggcucaaggcgtt

SEQ ID NO: 44 - DNA, 21 bp, Artificial Sequence
  Description of Combined DNA/RNA Molecule: Synthetic oligonucleotide
  Description of Artificial Sequence: Synthetic oligonucleotide
cgccuugagccuugcggugtt

SEQ ID NO: 45 - DNA, 21 bp, Artificial Sequence
  Description of Combined DNA/RNA Molecule: Synthetic oligonucleotide
  Description of Artificial Sequence: Synthetic oligonucleotide
cgcaaggcucaaggcgccgtt

SEQ ID NO: 46 - DNA, 21 bp, Artificial Sequence
  Description of Combined DNA/RNA Molecule: Synthetic oligonucleotide
  Description of Artificial Sequence: Synthetic oligonucleotide
cggcgccuugagccuugcgtt

SEQ ID NO: 47 - DNA, 21 bp, Artificial Sequence
  Description of Combined DNA/RNA Molecule: Synthetic oligonucleotide
  Description of Artificial Sequence: Synthetic oligonucleotide
caaggcucaaggcgccgcctt

SEQ ID NO: 48 - DNA, 21 bp, Artificial Sequence
  Description of Combined DNA/RNA Molecule: Synthetic oligonucleotide
  Description of Artificial Sequence: Synthetic oligonucleotide
ggcggcgccuugagccuugtt

SEQ ID NO: 49 - DNA, 21 bp, Artificial Sequence
  Description of Combined DNA/RNA Molecule: Synthetic oligonucleotide
  Description of Artificial Sequence: Synthetic oligonucleotide
guggaccgcgcacggccuctt

SEQ ID NO: 50 - DNA, 21 bp, Artificial Sequence
  Description of Combined DNA/RNA Molecule: Synthetic oligonucleotide
  Description of Artificial Sequence: Synthetic oligonucleotide
gaggccgugcgcgguccactt

SEQ ID NO: 51 - DNA, 21 bp, Artificial Sequence
  Description of Combined DNA/RNA Molecule: Synthetic oligonucleotide
  Description of Artificial Sequence: Synthetic oligonucleotide
uggaccgcgcacggccucutt

SEQ ID NO: 52 - DNA, 21 bp, Artificial Sequence
  Description of Combined DNA/RNA Molecule: Synthetic oligonucleotide
  Description of Artificial Sequence: Synthetic oligonucleotide
agaggccgugcgcgguccatt

SEQ ID NO: 53 - DNA, 21 bp, Artificial Sequence
  Description of Combined DNA/RNA Molecule: Synthetic oligonucleotide
  Description of Artificial Sequence: Synthetic oligonucleotide
ggaccgcgcacggccucuatt

SEQ ID NO: 54 - DNA, 21 bp, Artificial Sequence
  Description of Combined DNA/RNA Molecule: Synthetic oligonucleotide
  Description of Artificial Sequence: Synthetic oligonucleotide
uagaggccgugcgcggucctt

SEQ ID NO: 55 - DNA, 21 bp, Artificial Sequence
  Description of Combined DNA/RNA Molecule: Synthetic oligonucleotide
  Description of Artificial Sequence: Synthetic oligonucleotide
gaccgcgcacggccucuagtt

SEQ ID NO: 56 - DNA, 21 bp, Artificial Sequence
  Description of Combined DNA/RNA Molecule: Synthetic oligonucleotide
  Description of Artificial Sequence: Synthetic oligonucleotide
cuagaggccgugcgcgguctt

SEQ ID NO: 57 - DNA, 21 bp, Artificial Sequence
  Description of Combined DNA/RNA Molecule: Synthetic oligonucleotide
  Description of Artificial Sequence: Synthetic oligonucleotide
accgcgcacggccucuaggtt

SEQ ID NO: 58 - DNA, 21 bp, Artificial Sequence
  Description of Combined DNA/RNA Molecule: Synthetic oligonucleotide
  Description of Artificial Sequence: Synthetic oligonucleotide
ccuagaggccgugcgcggutt

SEQ ID NO: 59 - DNA, 21 bp, Artificial Sequence
  Description of Combined DNA/RNA Molecule: Synthetic oligonucleotide
  Description of Artificial Sequence: Synthetic oligonucleotide
ccgcgcacggccucuaggutt

SEQ ID NO: 60 - DNA, 21 bp, Artificial Sequence
  Description of Combined DNA/RNA Molecule: Synthetic oligonucleotide
  Description of Artificial Sequence: Synthetic oligonucleotide
accuagaggccgugcgcggtt

SEQ ID NO: 61 - DNA, 21 bp, Artificial Sequence
  Description of Combined DNA/RNA Molecule: Synthetic oligonucleotide
  Description of Artificial Sequence: Synthetic oligonucleotide
cgcgcacggccucuagguctt

SEQ ID NO: 62 - DNA, 21 bp, Artificial Sequence
  Description of Combined DNA/RNA Molecule: Synthetic oligonucleotide
  Description of Artificial Sequence: Synthetic oligonucleotide
gaccuagaggccgugcgcgtt

SEQ ID NO: 63 - DNA, 21 bp, Artificial Sequence
  Description of Combined DNA/RNA Molecule: Synthetic oligonucleotide
  Description of Artificial Sequence: Synthetic oligonucleotide
gcgcacggccucuaggucutt

SEQ ID NO: 64 - DNA, 21 bp, Artificial Sequence
  Description of Combined DNA/RNA Molecule: Synthetic oligonucleotide
  Description of Artificial Sequence: Synthetic oligonucleotide
agaccuagaggccgugcgctt

SEQ ID NO: 65 - DNA, 21 bp, Artificial Sequence
  Description of Combined DNA/RNA Molecule: Synthetic oligonucleotide
  Description of Artificial Sequence: Synthetic oligonucleotide
cgcacggccucuaggucuctt

SEQ ID NO: 66 - DNA, 21 bp, Artificial Sequence
  Description of Combined DNA/RNA Molecule: Synthetic oligonucleotide
  Description of Artificial Sequence: Synthetic oligonucleotide
gagaccuagaggccgugcgtt

SEQ ID NO: 67 - DNA, 21 bp, Artificial Sequence
  Description of Combined DNA/RNA Molecule: Synthetic oligonucleotide
  Description of Artificial Sequence: Synthetic oligonucleotide
cucuaggucuccucgccagtt

SEQ ID NO: 68 - DNA, 21 bp, Artificial Sequence
  Description of Combined DNA/RNA Molecule: Synthetic oligonucleotide
  Description of Artificial Sequence: Synthetic oligonucleotide
cuggcgaggagaccuagagtt

SEQ ID NO: 69 - DNA, 21 bp, Artificial Sequence
  Description of Combined DNA/RNA Molecule: Synthetic oligonucleotide
  Description of Artificial Sequence: Synthetic oligonucleotide
ucuaggucuccucgccaggtt

SEQ ID NO: 70 - DNA, 21 bp, Artificial Sequence
  Description of Combined DNA/RNA Molecule: Synthetic oligonucleotide
  Description of Artificial Sequence: Synthetic oligonucleotide
ccuggcgaggagaccuagatt

SEQ ID NO: 71 - DNA, 21 bp, Artificial Sequence
  Description of Combined DNA/RNA Molecule: Synthetic oligonucleotide
  Description of Artificial Sequence: Synthetic oligonucleotide
cuaggucuccucgccaggatt

SEQ ID NO: 72 - DNA, 21 bp, Artificial Sequence
  Description of Combined DNA/RNA Molecule: Synthetic oligonucleotide
  Description of Artificial Sequence: Synthetic oligonucleotide
uccuggcgaggagaccuagtt

SEQ ID NO: 73 - DNA, 21 bp, Artificial Sequence
  Description of Combined DNA/RNA Molecule: Synthetic oligonucleotide
  Description of Artificial Sequence: Synthetic oligonucleotide
aggucuccucgccaggacatt

SEQ ID NO: 74 - DNA, 21 bp, Artificial Sequence
  Description of Combined DNA/RNA Molecule: Synthetic oligonucleotide
  Description of Artificial Sequence: Synthetic oligonucleotide
uguccuggcgaggagaccutt

SEQ ID NO: 75 - DNA, 21 bp, Artificial Sequence
  Description of Combined DNA/RNA Molecule: Synthetic oligonucleotide
  Description of Artificial Sequence: Synthetic oligonucleotide
ccucgccaggacagcaacctt

SEQ ID NO: 76 - DNA, 21 bp, Artificial Sequence
  Description of Combined DNA/RNA Molecule: Synthetic oligonucleotide
  Description of Artificial Sequence: Synthetic oligonucleotide
gguugcuguccuggcgaggtt

SEQ ID NO: 77 - DNA, 21 bp, Artificial Sequence
  Description of Combined DNA/RNA Molecule: Synthetic oligonucleotide
  Description of Artificial Sequence: Synthetic oligonucleotide
cgucagcuccaggcggucctt

SEQ ID NO: 78 - DNA, 21 bp, Artificial Sequence
  Description of Combined DNA/RNA Molecule: Synthetic oligonucleotide
  Description of Artificial Sequence: Synthetic oligonucleotide
ggaccgccuggagcugacgtt

SEQ ID NO: 79 - DNA, 21 bp, Artificial Sequence
  Description of Combined DNA/RNA Molecule: Synthetic oligonucleotide
  Description of Artificial Sequence: Synthetic oligonucleotide
cgucagcuccaggcggucctt

SEQ ID NO: 80 - DNA, 21 bp, Artificial Sequence
  Description of Combined DNA/RNA Molecule: Synthetic oligonucleotide
  Description of Artificial Sequence: Synthetic oligonucleotide
ggaccgccuggagcugacgtt

SEQ ID NO: 81 - DNA, 21 bp, Artificial Sequence
  Description of Combined DNA/RNA Molecule: Synthetic oligonucleotide
  Description of Artificial Sequence: Synthetic oligonucleotide
gucagcuccaggcgguccutt

SEQ ID NO: 82 - DNA, 21 bp, Artificial Sequence
  Description of Combined DNA/RNA Molecule: Synthetic oligonucleotide
  Description of Artificial Sequence: Synthetic oligonucleotide
aggaccgccuggagcugactt

SEQ ID NO: 83 - DNA, 21 bp, Artificial Sequence
  Description of Combined DNA/RNA Molecule: Synthetic oligonucleotide
  Description of Artificial Sequence: Synthetic oligonucleotide
gucagcuccaggcgguccutt

SEQ ID NO: 84 - DNA, 21 bp, Artificial Sequence
  Description of Combined DNA/RNA Molecule: Synthetic oligonucleotide
  Description of Artificial Sequence: Synthetic oligonucleotide
aggaccgccuggagcugactt

SEQ ID NO: 85 - DNA, 21 bp, Artificial Sequence
  Description of Combined DNA/RNA Molecule: Synthetic oligonucleotide
  Description of Artificial Sequence: Synthetic oligonucleotide
ggcgcccgugcgcaggaggtt

SEQ ID NO: 86 - DNA, 21 bp, Artificial Sequence
  Description of Combined DNA/RNA Molecule: Synthetic oligonucleotide
  Description of Artificial Sequence: Synthetic oligonucleotide
ccuccugcgcacgggcgcctt

SEQ ID NO: 87 - DNA, 21 bp, Artificial Sequence
  Description of Combined DNA/RNA Molecule: Synthetic oligonucleotide
  Description of Artificial Sequence: Synthetic oligonucleotide
ggagcuggugcuagccuugtt

SEQ ID NO: 88 - DNA, 21 bp, Artificial Sequence
  Description of Combined DNA/RNA Molecule: Synthetic oligonucleotide
  Description of Artificial Sequence: Synthetic oligonucleotide
caaggcuagcaccagcucctt

SEQ ID NO: 89 - DNA, 21 bp, Artificial Sequence
  Description of Combined DNA/RNA Molecule: Synthetic oligonucleotide
  Description of Artificial Sequence: Synthetic oligonucleotide
ggagcuggugcuagccuugtt

SEQ ID NO: 90 - DNA, 21 bp, Artificial Sequence
  Description of Combined DNA/RNA Molecule: Synthetic oligonucleotide
  Description of Artificial Sequence: Synthetic oligonucleotide
caaggcuagcaccagcucctt

SEQ ID NO: 91 - DNA, 21 bp, Artificial Sequence
  Description of Combined DNA/RNA Molecule: Synthetic oligonucleotide
  Description of Artificial Sequence: Synthetic oligonucleotide
gcuggugcuagccuugcgutt

SEQ ID NO: 92 - DNA, 21 bp, Artificial Sequence
  Description of Combined DNA/RNA Molecule: Synthetic oligonucleotide
  Description of Artificial Sequence: Synthetic oligonucleotide
acgcaaggcuagcaccagctt

SEQ ID NO: 93 - DNA, 21 bp, Artificial Sequence
  Description of Combined DNA/RNA Molecule: Synthetic oligonucleotide
  Description of Artificial Sequence: Synthetic oligonucleotide
gcuggugcuagccuugcgutt

SEQ ID NO: 94 - DNA, 21 bp, Artificial Sequence
  Description of Combined DNA/RNA Molecule: Synthetic oligonucleotide
  Description of Artificial Sequence: Synthetic oligonucleotide
acgcaaggcuagcaccagctt

SEQ ID NO: 95 - DNA, 21 bp, Artificial Sequence
  Description of Combined DNA/RNA Molecule: Synthetic oligonucleotide
  Description of Artificial Sequence: Synthetic oligonucleotide
cuggugcuagccuugcguutt

SEQ ID NO: 96 - DNA, 21 bp, Artificial Sequence
  Description of Combined DNA/RNA Molecule: Synthetic oligonucleotide
  Description of Artificial Sequence: Synthetic oligonucleotide
aacgcaaggcuagcaccagtt

SEQ ID NO: 97 - DNA, 21 bp, Artificial Sequence
  Description of Combined DNA/RNA Molecule: Synthetic oligonucleotide
  Description of Artificial Sequence: Synthetic oligonucleotide
cuggugcuagccuugcguutt

SEQ ID NO: 98 - DNA, 21 bp, Artificial Sequence
  Description of Combined DNA/RNA Molecule: Synthetic oligonucleotide
  Description of Artificial Sequence: Synthetic oligonucleotide
aacgcaaggcuagcaccagtt

SEQ ID NO: 99 - DNA, 21 bp, Artificial Sequence
  Description of Combined DNA/RNA Molecule: Synthetic oligonucleotide
  Description of Artificial Sequence: Synthetic oligonucleotide
cuggugcuagccuugcguutt

SEQ ID NO: 100 - DNA, 21 bp, Artificial Sequence
  Description of Combined DNA/RNA Molecule: Synthetic oligonucleotide
  Description of Artificial Sequence: Synthetic oligonucleotide
aacgcaaggcuagcaccagtt

SEQ ID NO: 101 - DNA, 21 bp, Artificial Sequence
  Description of Combined DNA/RNA Molecule: Synthetic oligonucleotide
  Description of Artificial Sequence: Synthetic oligonucleotide
ugcuagccuugcguuccgatt

SEQ ID NO: 102 - DNA, 21 bp, Artificial Sequence
  Description of Combined DNA/RNA Molecule: Synthetic oligonucleotide
  Description of Artificial Sequence: Synthetic oligonucleotide
ucggaacgcaaggcuagcatt

SEQ ID NO: 103 - DNA, 21 bp, Artificial Sequence
  Description of Combined DNA/RNA Molecule: Synthetic oligonucleotide
  Description of Artificial Sequence: Synthetic oligonucleotide
ugcuagccuugcguuccgatt

SEQ ID NO: 104 - DNA, 21 bp, Artificial Sequence
  Description of Combined DNA/RNA Molecule: Synthetic oligonucleotide
  Description of Artificial Sequence: Synthetic oligonucleotide
ucggaacgcaaggcuagcatt

SEQ ID NO: 105 - DNA, 21 bp, Artificial Sequence
  Description of Combined DNA/RNA Molecule: Synthetic oligonucleotide
  Description of Artificial Sequence: Synthetic oligonucleotide
uagccuugcguuccgaggatt

SEQ ID NO: 106 - DNA, 21 bp, Artificial Sequence
  Description of Combined DNA/RNA Molecule: Synthetic oligonucleotide
  Description of Artificial Sequence: Synthetic oligonucleotide
uccucggaacgcaaggcuatt

SEQ ID NO: 107 - DNA, 21 bp, Artificial Sequence
  Description of Combined DNA/RNA Molecule: Synthetic oligonucleotide
  Description of Artificial Sequence: Synthetic oligonucleotide
uagccuugcguuccgaggatt

SEQ ID NO: 108 - DNA, 21 bp, Artificial Sequence
  Description of Combined DNA/RNA Molecule: Synthetic oligonucleotide
  Description of Artificial Sequence: Synthetic oligonucleotide
uccucggaacgcaaggcuatt

SEQ ID NO: 109 - DNA, 21 bp, Artificial Sequence
  Description of Combined DNA/RNA Molecule: Synthetic oligonucleotide
  Description of Artificial Sequence: Synthetic oligonucleotide
gacggccuggccgaagcactt

SEQ ID NO: 110 - DNA, 21 bp, Artificial Sequence
  Description of Combined DNA/RNA Molecule: Synthetic oligonucleotide
  Description of Artificial Sequence: Synthetic oligonucleotide
gugcuucggccaggccguctt

SEQ ID NO: 111 - DNA, 21 bp, Artificial Sequence
  Description of Combined DNA/RNA Molecule: Synthetic oligonucleotide
  Description of Artificial Sequence: Synthetic oligonucleotide
ggccgaagcacccgagcactt

SEQ ID NO: 112 - DNA, 21 bp, Artificial Sequence
  Description of Combined DNA/RNA Molecule: Synthetic oligonucleotide
  Description of Artificial Sequence: Synthetic oligonucleotide
gugcucgggugcuucggcctt

SEQ ID NO: 113 - DNA, 21 bp, Artificial Sequence
  Description of Combined DNA/RNA Molecule: Synthetic oligonucleotide
  Description of Artificial Sequence: Synthetic oligonucleotide
gccgaagcacccgagcacgtt

SEQ ID NO: 114 - DNA, 21 bp, Artificial Sequence
  Description of Combined DNA/RNA Molecule: Synthetic oligonucleotide
  Description of Artificial Sequence: Synthetic oligonucleotide
cgugcucgggugcuucggctt

SEQ ID NO: 115 - DNA, 21 bp, Artificial Sequence
  Description of Combined DNA/RNA Molecule: Synthetic oligonucleotide
  Description of Artificial Sequence: Synthetic oligonucleotide
ccgaagcacccgagcacggtt

SEQ ID NO: 116 - DNA, 21 bp, Artificial Sequence
  Description of Combined DNA/RNA Molecule: Synthetic oligonucleotide
  Description of Artificial Sequence: Synthetic oligonucleotide
ccgugcucgggugcuucggtt

SEQ ID NO: 117 - DNA, 21 bp, Artificial Sequence
  Description of Combined DNA/RNA Molecule: Synthetic oligonucleotide
  Description of Artificial Sequence: Synthetic oligonucleotide
ccgagcacggaaccacagctt

SEQ ID NO: 118 - DNA, 21 bp, Artificial Sequence
  Description of Combined DNA/RNA Molecule: Synthetic oligonucleotide
  Description of Artificial Sequence: Synthetic oligonucleotide
gcugugguuccgugcucggtt

SEQ ID NO: 119 - DNA, 21 bp, Artificial Sequence
  Description of Combined DNA/RNA Molecule: Synthetic oligonucleotide
  Description of Artificial Sequence: Synthetic oligonucleotide
caccgcugcgccaaggauctt

SEQ ID NO: 120 - DNA, 21 bp, Artificial Sequence
  Description of Combined DNA/RNA Molecule: Synthetic oligonucleotide
  Description of Artificial Sequence: Synthetic oligonucleotide
gauccuuggcgcagcggugtt

SEQ ID NO: 121 - DNA, 21 bp, Artificial Sequence
  Description of Combined DNA/RNA Molecule: Synthetic oligonucleotide
  Description of Artificial Sequence: Synthetic oligonucleotide
ccgcugcgccaaggauccgtt

SEQ ID NO: 122 - DNA, 21 bp, Artificial Sequence
  Description of Combined DNA/RNA Molecule: Synthetic oligonucleotide
  Description of Artificial Sequence: Synthetic oligonucleotide
cggauccuuggcgcagcggtt

SEQ ID NO: 123 - DNA, 21 bp, Artificial Sequence
  Description of Combined DNA/RNA Molecule: Synthetic oligonucleotide
  Description of Artificial Sequence: Synthetic oligonucleotide
cgcugcgccaaggauccgutt

SEQ ID NO: 124 - DNA, 21 bp, Artificial Sequence
  Description of Combined DNA/RNA Molecule: Synthetic oligonucleotide
  Description of Artificial Sequence: Synthetic oligonucleotide
acggauccuuggcgcagcgtt

SEQ ID NO: 125 - DNA, 21 bp, Artificial Sequence
  Description of Combined DNA/RNA Molecule: Synthetic oligonucleotide
  Description of Artificial Sequence: Synthetic oligonucleotide
cugcgccaaggauccguggtt

SEQ ID NO: 126 - DNA, 21 bp, Artificial Sequence
  Description of Combined DNA/RNA Molecule: Synthetic oligonucleotide
  Description of Artificial Sequence: Synthetic oligonucleotide
ccacggauccuuggcgcagtt

SEQ ID NO: 127 - DNA, 21 bp, Artificial Sequence
  Description of Combined DNA/RNA Molecule: Synthetic oligonucleotide
  Description of Artificial Sequence: Synthetic oligonucleotide
auccguggagguugccuggtt

SEQ ID NO: 128 - DNA, 21 bp, Artificial Sequence
  Description of Combined DNA/RNA Molecule: Synthetic oligonucleotide
  Description of Artificial Sequence: Synthetic oligonucleotide
ccaggcaaccuccacggautt

SEQ ID NO: 129 - DNA, 21 bp, Artificial Sequence
  Description of Combined DNA/RNA Molecule: Synthetic oligonucleotide
  Description of Artificial Sequence: Synthetic oligonucleotide
gguugccuggcaccuacgutt

SEQ ID NO: 130 - DNA, 21 bp, Artificial Sequence
  Description of Combined DNA/RNA Molecule: Synthetic oligonucleotide
  Description of Artificial Sequence: Synthetic oligonucleotide
acguaggugccaggcaacctt

SEQ ID NO: 131 - DNA, 21 bp, Artificial Sequence
  Description of Combined DNA/RNA Molecule: Synthetic oligonucleotide
  Description of Artificial Sequence: Synthetic oligonucleotide
aggagacccaccucucgcatt

SEQ ID NO: 132 - DNA, 21 bp, Artificial Sequence
  Description of Combined DNA/RNA Molecule: Synthetic oligonucleotide
  Description of Artificial Sequence: Synthetic oligonucleotide
ugcgagaggugggucuccutt

SEQ ID NO: 133 - DNA, 21 bp, Artificial Sequence
  Description of Combined DNA/RNA Molecule: Synthetic oligonucleotide
  Description of Artificial Sequence: Synthetic oligonucleotide
ggagacccaccucucgcagtt

SEQ ID NO: 134 - DNA, 21 bp, Artificial Sequence
  Description of Combined DNA/RNA Molecule: Synthetic oligonucleotide
  Description of Artificial Sequence: Synthetic oligonucleotide
cugcgagaggugggucucctt

SEQ ID NO: 135 - DNA, 21 bp, Artificial Sequence
  Description of Combined DNA/RNA Molecule: Synthetic oligonucleotide
  Description of Artificial Sequence: Synthetic oligonucleotide
gagacccaccucucgcagutt

SEQ ID NO: 136 - DNA, 21 bp, Artificial Sequence
  Description of Combined DNA/RNA Molecule: Synthetic oligonucleotide
  Description of Artificial Sequence: Synthetic oligonucleotide
acugcgagaggugggucuctt

SEQ ID NO: 137 - DNA, 21 bp, Artificial Sequence
  Description of Combined DNA/RNA Molecule: Synthetic oligonucleotide
  Description of Artificial Sequence: Synthetic oligonucleotide
ccaccucucgcagucagagtt

SEQ ID NO: 138 - DNA, 21 bp, Artificial Sequence
  Description of Combined DNA/RNA Molecule: Synthetic oligonucleotide
  Description of Artificial Sequence: Synthetic oligonucleotide
cucugacugcgagagguggtt

SEQ ID NO: 139 - DNA, 21 bp, Artificial Sequence
  Description of Combined DNA/RNA Molecule: Synthetic oligonucleotide
  Description of Artificial Sequence: Synthetic oligonucleotide
ccucucgcagucagagcgctt

SEQ ID NO: 140 - DNA, 21 bp, Artificial Sequence
  Description of Combined DNA/RNA Molecule: Synthetic oligonucleotide
  Description of Artificial Sequence: Synthetic oligonucleotide
gcgcucugacugcgagaggtt

SEQ ID NO: 141 - DNA, 21 bp, Artificial Sequence
  Description of Combined DNA/RNA Molecule: Synthetic oligonucleotide
  Description of Artificial Sequence: Synthetic oligonucleotide
cucucgcagucagagcgcatt

SEQ ID NO: 142 - DNA, 21 bp, Artificial Sequence
  Description of Combined DNA/RNA Molecule: Synthetic oligonucleotide
  Description of Artificial Sequence: Synthetic oligonucleotide
ugcgcucugacugcgagagtt

SEQ ID NO: 143 - DNA, 21 bp, Artificial Sequence
  Description of Combined DNA/RNA Molecule: Synthetic oligonucleotide
  Description of Artificial Sequence: Synthetic oligonucleotide
ucucgcagucagagcgcactt

SEQ ID NO: 144 - DNA, 21 bp, Artificial Sequence
  Description of Combined DNA/RNA Molecule: Synthetic oligonucleotide
  Description of Artificial Sequence: Synthetic oligonucleotide
gugcgcucugacugcgagatt

SEQ ID NO: 145 - DNA, 21 bp, Artificial Sequence
  Description of Combined DNA/RNA Molecule: Synthetic oligonucleotide
  Description of Artificial Sequence: Synthetic oligonucleotide
cucgcagucagagcgcacutt

SEQ ID NO: 146 - DNA, 21 bp, Artificial Sequence
  Description of Combined DNA/RNA Molecule: Synthetic oligonucleotide
  Description of Artificial Sequence: Synthetic oligonucleotide
agugcgcucugacugcgagtt

SEQ ID NO: 147 - DNA, 21 bp, Artificial Sequence
  Description of Combined DNA/RNA Molecule: Synthetic oligonucleotide
  Description of Artificial Sequence: Synthetic oligonucleotide
cucgcagucagagcgcacutt

SEQ ID NO: 148 - DNA, 21 bp, Artificial Sequence
  Description of Combined DNA/RNA Molecule: Synthetic oligonucleotide
  Description of Artificial Sequence: Synthetic oligonucleotide
agugcgcucugacugcgagtt

SEQ ID NO: 149 - DNA, 21 bp, Artificial Sequence
  Description of Combined DNA/RNA Molecule: Synthetic oligonucleotide
  Description of Artificial Sequence: Synthetic oligonucleotide
gcagucagagcgcacugcctt

SEQ ID NO: 150 - DNA, 21 bp, Artificial Sequence
  Description of Combined DNA/RNA Molecule: Synthetic oligonucleotide
  Description of Artificial Sequence: Synthetic oligonucleotide
ggcagugcgcucugacugctt

SEQ ID NO: 151 - DNA, 21 bp, Artificial Sequence
  Description of Combined DNA/RNA Molecule: Synthetic oligonucleotide
  Description of Artificial Sequence: Synthetic oligonucleotide
gcagucagagcgcacugcctt

SEQ ID NO: 152 - DNA, 21 bp, Artificial Sequence
  Description of Combined DNA/RNA Molecule: Synthetic oligonucleotide
  Description of Artificial Sequence: Synthetic oligonucleotide
ggcagugcgcucugacugctt

SEQ ID NO: 153 - DNA, 21 bp, Artificial Sequence
  Description of Combined DNA/RNA Molecule: Synthetic oligonucleotide
  Description of Artificial Sequence: Synthetic oligonucleotide
gggauaccucaccaagauctt

SEQ ID NO: 154 - DNA, 21 bp, Artificial Sequence
  Description of Combined DNA/RNA Molecule: Synthetic oligonucleotide
  Description of Artificial Sequence: Synthetic oligonucleotide
gaucuuggugagguauccctt

SEQ ID NO: 155 - DNA, 21 bp, Artificial Sequence
  Description of Combined DNA/RNA Molecule: Synthetic oligonucleotide
  Description of Artificial Sequence: Synthetic oligonucleotide
gggauaccucaccaagauctt

SEQ ID NO: 156 - DNA, 21 bp, Artificial Sequence
  Description of Combined DNA/RNA Molecule: Synthetic oligonucleotide
  Description of Artificial Sequence: Synthetic oligonucleotide
gaucuuggugagguauccctt

SEQ ID NO: 157 - DNA, 21 bp, Artificial Sequence
  Description of Combined DNA/RNA Molecule: Synthetic oligonucleotide
  Description of Artificial Sequence: Synthetic oligonucleotide
uggugaagaugaguggcgatt

SEQ ID NO: 158 - DNA, 21 bp, Artificial Sequence
  Description of Combined DNA/RNA Molecule: Synthetic oligonucleotide
  Description of Artificial Sequence: Synthetic oligonucleotide
ucgccacucaucuucaccatt

SEQ ID NO: 159 - DNA, 21 bp, Artificial Sequence
  Description of Combined DNA/RNA Molecule: Synthetic oligonucleotide
  Description of Artificial Sequence: Synthetic oligonucleotide
uggugaagaugaguggcgatt

SEQ ID NO: 160 - DNA, 21 bp, Artificial Sequence
  Description of Combined DNA/RNA Molecule: Synthetic oligonucleotide
  Description of Artificial Sequence: Synthetic oligonucleotide
ucgccacucaucuucaccatt

SEQ ID NO: 161 - DNA, 21 bp, Artificial Sequence
  Description of Combined DNA/RNA Molecule: Synthetic oligonucleotide
  Description of Artificial Sequence: Synthetic oligonucleotide
gaagaugaguggcgaccugtt

SEQ ID NO: 162 - DNA, 21 bp, Artificial Sequence
  Description of Combined DNA/RNA Molecule: Synthetic oligonucleotide
  Description of Artificial Sequence: Synthetic oligonucleotide
caggucgccacucaucuuctt

SEQ ID NO: 163 - DNA, 21 bp, Artificial Sequence
  Description of Combined DNA/RNA Molecule: Synthetic oligonucleotide
  Description of Artificial Sequence: Synthetic oligonucleotide
gaagaugaguggcgaccugtt

SEQ ID NO: 164 - DNA, 21 bp, Artificial Sequence
  Description of Combined DNA/RNA Molecule: Synthetic oligonucleotide
  Description of Artificial Sequence: Synthetic oligonucleotide
caggucgccacucaucuuctt

SEQ ID NO: 165 - DNA, 21 bp, Artificial Sequence
  Description of Combined DNA/RNA Molecule: Synthetic oligonucleotide
  Description of Artificial Sequence: Synthetic oligonucleotide
cccaugucgacuacaucgatt

SEQ ID NO: 166 - DNA, 21 bp, Artificial Sequence
  Description of Combined DNA/RNA Molecule: Synthetic oligonucleotide
  Description of Artificial Sequence: Synthetic oligonucleotide
ucgauguagucgacaugggtt

SEQ ID NO: 167 - DNA, 21 bp, Artificial Sequence
  Description of Combined DNA/RNA Molecule: Synthetic oligonucleotide
  Description of Artificial Sequence: Synthetic oligonucleotide
cccaugucgacuacaucgatt

SEQ ID NO: 168 - DNA, 21 bp, Artificial Sequence
  Description of Combined DNA/RNA Molecule: Synthetic oligonucleotide
  Description of Artificial Sequence: Synthetic oligonucleotide
ucgauguagucgacaugggtt

SEQ ID NO: 169 - DNA, 21 bp, Artificial Sequence
  Description of Combined DNA/RNA Molecule: Synthetic oligonucleotide
  Description of Artificial Sequence: Synthetic oligonucleotide
aucgaggaggacuccucugtt

SEQ ID NO: 170 - DNA, 21 bp, Artificial Sequence
  Description of Combined DNA/RNA Molecule: Synthetic oligonucleotide
  Description of Artificial Sequence: Synthetic oligonucleotide
cagaggaguccuccucgautt

SEQ ID NO: 171 - DNA, 21 bp, Artificial Sequence
  Description of Combined DNA/RNA Molecule: Synthetic oligonucleotide
  Description of Artificial Sequence: Synthetic oligonucleotide
aucgaggaggacuccucugtt

SEQ ID NO: 172 - DNA, 21 bp, Artificial Sequence
  Description of Combined DNA/RNA Molecule: Synthetic oligonucleotide
  Description of Artificial Sequence: Synthetic oligonucleotide
cagaggaguccuccucgautt

SEQ ID NO: 173 - DNA, 21 bp, Artificial Sequence
  Description of Combined DNA/RNA Molecule: Synthetic oligonucleotide
  Description of Artificial Sequence: Synthetic oligonucleotide
ggaaccuggagcggauuactt

SEQ ID NO: 174 - DNA, 21 bp, Artificial Sequence
  Description of Combined DNA/RNA Molecule: Synthetic oligonucleotide
  Description of Artificial Sequence: Synthetic oligonucleotide
guaauccgcuccagguucctt

SEQ ID NO: 175 - DNA, 21 bp, Artificial Sequence
  Description of Combined DNA/RNA Molecule: Synthetic oligonucleotide
  Description of Artificial Sequence: Synthetic oligonucleotide
gaaccuggagcggauuacctt

SEQ ID NO: 176 - DNA, 21 bp, Artificial Sequence
  Description of Combined DNA/RNA Molecule: Synthetic oligonucleotide
  Description of Artificial Sequence: Synthetic oligonucleotide
gguaauccgcuccagguuctt

SEQ ID NO: 177 - DNA, 21 bp, Artificial Sequence
  Description of Combined DNA/RNA Molecule: Synthetic oligonucleotide
  Description of Artificial Sequence: Synthetic oligonucleotide
aaccuggagcggauuaccctt

SEQ ID NO: 178 - DNA, 21 bp, Artificial Sequence
  Description of Combined DNA/RNA Molecule: Synthetic oligonucleotide
  Description of Artificial Sequence: Synthetic oligonucleotide
ggguaauccgcuccagguutt

SEQ ID NO: 179 - DNA, 21 bp, Artificial Sequence
  Description of Combined DNA/RNA Molecule: Synthetic oligonucleotide
  Description of Artificial Sequence: Synthetic oligonucleotide
cccuccacgguaccgggcgtt

SEQ ID NO: 180 - DNA, 21 bp, Artificial Sequence
  Description of Combined DNA/RNA Molecule: Synthetic oligonucleotide
  Description of Artificial Sequence: Synthetic oligonucleotide
cgcccgguaccguggagggtt

SEQ ID NO: 181 - DNA, 21 bp, Artificial Sequence
  Description of Combined DNA/RNA Molecule: Synthetic oligonucleotide
  Description of Artificial Sequence: Synthetic oligonucleotide
cacgguaccgggcggaugatt

SEQ ID NO: 182 - DNA, 21 bp, Artificial Sequence
  Description of Combined DNA/RNA Molecule: Synthetic oligonucleotide
  Description of Artificial Sequence: Synthetic oligonucleotide
ucauccgcccgguaccgugtt

SEQ ID NO: 183 - DNA, 21 bp, Artificial Sequence
  Description of Combined DNA/RNA Molecule: Synthetic oligonucleotide
  Description of Artificial Sequence: Synthetic oligonucleotide
cacgguaccgggcggaugatt

SEQ ID NO: 184 - DNA, 21 bp, Artificial Sequence
  Description of Combined DNA/RNA Molecule: Synthetic oligonucleotide
  Description of Artificial Sequence: Synthetic oligonucleotide
ucauccgcccgguaccgugtt

SEQ ID NO: 185 - DNA, 21 bp, Artificial Sequence
  Description of Combined DNA/RNA Molecule: Synthetic oligonucleotide
  Description of Artificial Sequence: Synthetic oligonucleotide
acgguaccgggcggaugaatt

SEQ ID NO: 186 - DNA, 21 bp, Artificial Sequence
  Description of Combined DNA/RNA Molecule: Synthetic oligonucleotide
  Description of Artificial Sequence: Synthetic oligonucleotide
uucauccgcccgguaccgutt

SEQ ID NO: 187 - DNA, 21 bp, Artificial Sequence
  Description of Combined DNA/RNA Molecule: Synthetic oligonucleotide
  Description of Artificial Sequence: Synthetic oligonucleotide
acgguaccgggcggaugaatt

SEQ ID NO: 188 - DNA, 21 bp, Artificial Sequence
  Description of Combined DNA/RNA Molecule: Synthetic oligonucleotide
  Description of Artificial Sequence: Synthetic oligonucleotide
uucauccgcccgguaccgutt

SEQ ID NO: 189 - DNA, 21 bp, Artificial Sequence
  Description of Combined DNA/RNA Molecule: Synthetic oligonucleotide
  Description of Artificial Sequence: Synthetic oligonucleotide
cgguaccgggcggaugaautt

SEQ ID NO: 190 - DNA, 21 bp, Artificial Sequence
  Description of Combined DNA/RNA Molecule: Synthetic oligonucleotide
  Description of Artificial Sequence: Synthetic oligonucleotide
auucauccgcccgguaccgtt

SEQ ID NO: 191 - DNA, 21 bp, Artificial Sequence
  Description of Combined DNA/RNA Molecule: Synthetic oligonucleotide
  Description of Artificial Sequence: Synthetic oligonucleotide
cgguaccgggcggaugaautt

SEQ ID NO: 192 - DNA, 21 bp, Artificial Sequence
  Description of Combined DNA/RNA Molecule: Synthetic oligonucleotide
  Description of Artificial Sequence: Synthetic oligonucleotide
auucauccgcccgguaccgtt

SEQ ID NO: 193 - DNA, 21 bp, Artificial Sequence
  Description of Combined DNA/RNA Molecule: Synthetic oligonucleotide
  Description of Artificial Sequence: Synthetic oligonucleotide
gguaccgggcggaugaauatt

SEQ ID NO: 194 - DNA, 21 bp, Artificial Sequence
  Description of Combined DNA/RNA Molecule: Synthetic oligonucleotide
  Description of Artificial Sequence: Synthetic oligonucleotide
uauucauccgcccgguacctt

SEQ ID NO: 195 - DNA, 21 bp, Artificial Sequence
  Description of Combined DNA/RNA Molecule: Synthetic oligonucleotide
  Description of Artificial Sequence: Synthetic oligonucleotide
gguaccgggcggaugaauatt

SEQ ID NO: 196 - DNA, 21 bp, Artificial Sequence
  Description of Combined DNA/RNA Molecule: Synthetic oligonucleotide
  Description of Artificial Sequence: Synthetic oligonucleotide
uauucauccgcccgguacctt

SEQ ID NO: 197 - DNA, 21 bp, Artificial Sequence
  Description of Combined DNA/RNA Molecule: Synthetic oligonucleotide
  Description of Artificial Sequence: Synthetic oligonucleotide
guaccgggcggaugaauactt

SEQ ID NO: 198 - DNA, 21 bp, Artificial Sequence
  Description of Combined DNA/RNA Molecule: Synthetic oligonucleotide
  Description of Artificial Sequence: Synthetic oligonucleotide
guauucauccgcccgguactt

SEQ ID NO: 199 - DNA, 21 bp, Artificial Sequence
  Description of Combined DNA/RNA Molecule: Synthetic oligonucleotide
  Description of Artificial Sequence: Synthetic oligonucleotide
guaccgggcggaugaauactt

SEQ ID NO: 200 - DNA, 21 bp, Artificial Sequence
  Description of Combined DNA/RNA Molecule: Synthetic oligonucleotide
  Description of Artificial Sequence: Synthetic oligonucleotide
guauucauccgcccgguactt

SEQ ID NO: 201 - DNA, 21 bp, Artificial Sequence
  Description of Combined DNA/RNA Molecule: Synthetic oligonucleotide
  Description of Artificial Sequence: Synthetic oligonucleotide
accgggcggaugaauaccatt

SEQ ID NO: 202 - DNA, 21 bp, Artificial Sequence
  Description of Combined DNA/RNA Molecule: Synthetic oligonucleotide
  Description of Artificial Sequence: Synthetic oligonucleotide
ugguauucauccgcccggutt

SEQ ID NO: 203 - DNA, 21 bp, Artificial Sequence
  Description of Combined DNA/RNA Molecule: Synthetic oligonucleotide
  Description of Artificial Sequence: Synthetic oligonucleotide
accgggcggaugaauaccatt

SEQ ID NO: 204 - DNA, 21 bp, Artificial Sequence
  Description of Combined DNA/RNA Molecule: Synthetic oligonucleotide
  Description of Artificial Sequence: Synthetic oligonucleotide
ugguauucauccgcccggutt

SEQ ID NO: 205 - DNA, 21 bp, Artificial Sequence
  Description of Combined DNA/RNA Molecule: Synthetic oligonucleotide
  Description of Artificial Sequence: Synthetic oligonucleotide
ccgggcggaugaauaccagtt

SEQ ID NO: 206 - DNA, 21 bp, Artificial Sequence
  Description of Combined DNA/RNA Molecule: Synthetic oligonucleotide
  Description of Artificial Sequence: Synthetic oligonucleotide
cugguauucauccgcccggtt

SEQ ID NO: 207 - DNA, 21 bp, Artificial Sequence
  Description of Combined DNA/RNA Molecule: Synthetic oligonucleotide
  Description of Artificial Sequence: Synthetic oligonucleotide
ccgggcggaugaauaccagtt

SEQ ID NO: 208 - DNA, 21 bp, Artificial Sequence
  Description of Combined DNA/RNA Molecule: Synthetic oligonucleotide
  Description of Artificial Sequence: Synthetic oligonucleotide
cugguauucauccgcccggtt

SEQ ID NO: 209 - DNA, 21 bp, Artificial Sequence
  Description of Combined DNA/RNA Molecule: Synthetic oligonucleotide
  Description of Artificial Sequence: Synthetic oligonucleotide
ccugguggagguguaucuctt

SEQ ID NO: 210 - DNA, 21 bp, Artificial Sequence
  Description of Combined DNA/RNA Molecule: Synthetic oligonucleotide
  Description of Artificial Sequence: Synthetic oligonucleotide
gagauacaccuccaccaggtt

SEQ ID NO: 211 - DNA, 21 bp, Artificial Sequence
  Description of Combined DNA/RNA Molecule: Synthetic oligonucleotide
  Description of Artificial Sequence: Synthetic oligonucleotide
ccugguggagguguaucuctt

SEQ ID NO: 212 - DNA, 21 bp, Artificial Sequence
  Description of Combined DNA/RNA Molecule: Synthetic oligonucleotide
  Description of Artificial Sequence: Synthetic oligonucleotide
gagauacaccuccaccaggtt

SEQ ID NO: 213 - DNA, 21 bp, Artificial Sequence
  Description of Combined DNA/RNA Molecule: Synthetic oligonucleotide
  Description of Artificial Sequence: Synthetic oligonucleotide
cugguggagguguaucucctt

SEQ ID NO: 214 - DNA, 21 bp, Artificial Sequence
  Description of Combined DNA/RNA Molecule: Synthetic oligonucleotide
  Description of Artificial Sequence: Synthetic oligonucleotide
ggagauacaccuccaccagtt

SEQ ID NO: 215 - DNA, 21 bp, Artificial Sequence
  Description of Combined DNA/RNA Molecule: Synthetic oligonucleotide
  Description of Artificial Sequence: Synthetic oligonucleotide
cugguggagguguaucucctt

SEQ ID NO: 216 - DNA, 21 bp, Artificial Sequence
  Description of Combined DNA/RNA Molecule: Synthetic oligonucleotide
  Description of Artificial Sequence: Synthetic oligonucleotide
ggagauacaccuccaccagtt

SEQ ID NO: 217 - DNA, 21 bp, Artificial Sequence
  Description of Combined DNA/RNA Molecule: Synthetic oligonucleotide
  Description of Artificial Sequence: Synthetic oligonucleotide
ugguggagguguaucuccutt

SEQ ID NO: 218 - DNA, 21 bp, Artificial Sequence
  Description of Combined DNA/RNA Molecule: Synthetic oligonucleotide
  Description of Artificial Sequence: Synthetic oligonucleotide
aggagauacaccuccaccatt

SEQ ID NO: 219 - DNA, 21 bp, Artificial Sequence
  Description of Combined DNA/RNA Molecule: Synthetic oligonucleotide
  Description of Artificial Sequence: Synthetic oligonucleotide
ugguggagguguaucuccutt

SEQ ID NO: 220 - DNA, 21 bp, Artificial Sequence
  Description of Combined DNA/RNA Molecule: Synthetic oligonucleotide
  Description of Artificial Sequence: Synthetic oligonucleotide
aggagauacaccuccaccatt

SEQ ID NO: 221 - DNA, 21 bp, Artificial Sequence
  Description of Combined DNA/RNA Molecule: Synthetic oligonucleotide
  Description of Artificial Sequence: Synthetic oligonucleotide
gguggagguguaucuccuatt

SEQ ID NO: 222 - DNA, 21 bp, Artificial Sequence
  Description of Combined DNA/RNA Molecule: Synthetic oligonucleotide
  Description of Artificial Sequence: Synthetic oligonucleotide
uaggagauacaccuccacctt

SEQ ID NO: 223 - DNA, 21 bp, Artificial Sequence
  Description of Combined DNA/RNA Molecule: Synthetic oligonucleotide
  Description of Artificial Sequence: Synthetic oligonucleotide
gguggagguguaucuccuatt

SEQ ID NO: 224 - DNA, 21 bp, Artificial Sequence
  Description of Combined DNA/RNA Molecule: Synthetic oligonucleotide
  Description of Artificial Sequence: Synthetic oligonucleotide
uaggagauacaccuccacctt

SEQ ID NO: 225 - DNA, 21 bp, Artificial Sequence
  Description of Combined DNA/RNA Molecule: Synthetic oligonucleotide
  Description of Artificial Sequence: Synthetic oligonucleotide
ggagguguaucuccuagactt

SEQ ID NO: 226 - DNA, 21 bp, Artificial Sequence
  Description of Combined DNA/RNA Molecule: Synthetic oligonucleotide
  Description of Artificial Sequence: Synthetic oligonucleotide
gucuaggagauacaccucctt

SEQ ID NO: 227 - DNA, 21 bp, Artificial Sequence
  Description of Combined DNA/RNA Molecule: Synthetic oligonucleotide
  Description of Artificial Sequence: Synthetic oligonucleotide
ggagguguaucuccuagactt

SEQ ID NO: 228 - DNA, 21 bp, Artificial Sequence
  Description of Combined DNA/RNA Molecule: Synthetic oligonucleotide
  Description of Artificial Sequence: Synthetic oligonucleotide
gucuaggagauacaccucctt

SEQ ID NO: 229 - DNA, 21 bp, Artificial Sequence
  Description of Combined DNA/RNA Molecule: Synthetic oligonucleotide
  Description of Artificial Sequence: Synthetic oligonucleotide
agguguaucuccuagacactt

SEQ ID NO: 230 - DNA, 21 bp, Artificial Sequence
  Description of Combined DNA/RNA Molecule: Synthetic oligonucleotide
  Description of Artificial Sequence: Synthetic oligonucleotide
gugucuaggagauacaccutt

SEQ ID NO: 231 - DNA, 21 bp, Artificial Sequence
  Description of Combined DNA/RNA Molecule: Synthetic oligonucleotide
  Description of Artificial Sequence: Synthetic oligonucleotide
agguguaucuccuagacactt

SEQ ID NO: 232 - DNA, 21 bp, Artificial Sequence
  Description of Combined DNA/RNA Molecule: Synthetic oligonucleotide
  Description of Artificial Sequence: Synthetic oligonucleotide
gugucuaggagauacaccutt

SEQ ID NO: 233 - DNA, 21 bp, Artificial Sequence
  Description of Combined DNA/RNA Molecule: Synthetic oligonucleotide
  Description of Artificial Sequence: Synthetic oligonucleotide
agguguaucuccuagacactt

SEQ ID NO: 234 - DNA, 21 bp, Artificial Sequence
  Description of Combined DNA/RNA Molecule: Synthetic oligonucleotide
  Description of Artificial Sequence: Synthetic oligonucleotide
gugucuaggagauacaccutt

SEQ ID NO: 235 - DNA, 21 bp, Artificial Sequence
  Description of Combined DNA/RNA Molecule: Synthetic oligonucleotide
  Description of Artificial Sequence: Synthetic oligonucleotide
agguguaucuccuagacactt

SEQ ID NO: 236 - DNA, 21 bp, Artificial Sequence
  Description of Combined DNA/RNA Molecule: Synthetic oligonucleotide
  Description of Artificial Sequence: Synthetic oligonucleotide
gugucuaggagauacaccutt

SEQ ID NO: 237 - DNA, 21 bp, Artificial Sequence
  Description of Combined DNA/RNA Molecule: Synthetic oligonucleotide
  Description of Artificial Sequence: Synthetic oligonucleotide
agguguaucuccuagacactt

SEQ ID NO: 238 - DNA, 21 bp, Artificial Sequence
  Description of Combined DNA/RNA Molecule: Synthetic oligonucleotide
  Description of Artificial Sequence: Synthetic oligonucleotide
gugucuaggagauacaccutt

SEQ ID NO: 239 - DNA, 21 bp, Artificial Sequence
  Description of Combined DNA/RNA Molecule: Synthetic oligonucleotide
  Description of Artificial Sequence: Synthetic oligonucleotide
agguguaucuccuagacactt

SEQ ID NO: 240 - DNA, 21 bp, Artificial Sequence
  Description of Combined DNA/RNA Molecule: Synthetic oligonucleotide
  Description of Artificial Sequence: Synthetic oligonucleotide
gugucuaggagauacaccutt

SEQ ID NO: 241 - DNA, 21 bp, Artificial Sequence
  Description of Combined DNA/RNA Molecule: Synthetic oligonucleotide
  Description of Artificial Sequence: Synthetic oligonucleotide
agguguaucuccuagacactt

SEQ ID NO: 242 - DNA, 21 bp, Artificial Sequence
  Description of Combined DNA/RNA Molecule: Synthetic oligonucleotide
  Description of Artificial Sequence: Synthetic oligonucleotide
gugucuaggagauacaccutt

SEQ ID NO: 243 - DNA, 21 bp, Artificial Sequence
  Description of Combined DNA/RNA Molecule: Synthetic oligonucleotide
  Description of Artificial Sequence: Synthetic oligonucleotide
agguguaucuccuagacactt

SEQ ID NO: 244 - DNA, 21 bp, Artificial Sequence
  Description of Combined DNA/RNA Molecule: Synthetic oligonucleotide
  Description of Artificial Sequence: Synthetic oligonucleotide
gugucuaggagauacaccutt

SEQ ID NO: 245 - DNA, 21 bp, Artificial Sequence
  Description of Combined DNA/RNA Molecule: Synthetic oligonucleotide
  Description of Artificial Sequence: Synthetic oligonucleotide
agguguaucuccuagacactt

SEQ ID NO: 246 - DNA, 21 bp, Artificial Sequence
  Description of Combined DNA/RNA Molecule: Synthetic oligonucleotide
  Description of Artificial Sequence: Synthetic oligonucleotide
gugucuaggagauacaccutt

SEQ ID NO: 247 - DNA, 21 bp, Artificial Sequence
  Description of Combined DNA/RNA Molecule: Synthetic oligonucleotide
  Description of Artificial Sequence: Synthetic oligonucleotide
gcacccucauaggccuggatt

SEQ ID NO: 248 - DNA, 21 bp, Artificial Sequence
  Description of Combined DNA/RNA Molecule: Synthetic oligonucleotide
  Description of Artificial Sequence: Synthetic oligonucleotide
uccaggccuaugagggugctt

SEQ ID NO: 249 - DNA, 21 bp, Artificial Sequence
  Description of Combined DNA/RNA Molecule: Synthetic oligonucleotide
  Description of Artificial Sequence: Synthetic oligonucleotide
gcacccucauaggccuggatt

SEQ ID NO: 250 - DNA, 21 bp, Artificial Sequence
  Description of Combined DNA/RNA Molecule: Synthetic oligonucleotide
  Description of Artificial Sequence: Synthetic oligonucleotide
uccaggccuaugagggugctt

SEQ ID NO: 251 - DNA, 21 bp, Artificial Sequence
  Description of Combined DNA/RNA Molecule: Synthetic oligonucleotide
  Description of Artificial Sequence: Synthetic oligonucleotide
gcacccucauaggccuggatt

SEQ ID NO: 252 - DNA, 21 bp, Artificial Sequence
  Description of Combined DNA/RNA Molecule: Synthetic oligonucleotide
  Description of Artificial Sequence: Synthetic oligonucleotide
uccaggccuaugagggugctt

SEQ ID NO: 253 - DNA, 21 bp, Artificial Sequence
  Description of Combined DNA/RNA Molecule: Synthetic oligonucleotide
  Description of Artificial Sequence: Synthetic oligonucleotide
gcacccucauaggccuggatt

SEQ ID NO: 254 - DNA, 21 bp, Artificial Sequence
  Description of Combined DNA/RNA Molecule: Synthetic oligonucleotide
  Description of Artificial Sequence: Synthetic oligonucleotide
uccaggccuaugagggugctt

SEQ ID NO: 255 - DNA, 21 bp, Artificial Sequence
  Description of Combined DNA/RNA Molecule: Synthetic oligonucleotide
  Description of Artificial Sequence: Synthetic oligonucleotide
gcacccucauaggccuggatt

SEQ ID NO: 256 - DNA, 21 bp, Artificial Sequence
  Description of Combined DNA/RNA Molecule: Synthetic oligonucleotide
  Description of Artificial Sequence: Synthetic oligonucleotide
uccaggccuaugagggugctt

SEQ ID NO: 257 - DNA, 21 bp, Artificial Sequence
  Description of Combined DNA/RNA Molecule: Synthetic oligonucleotide
  Description of Artificial Sequence: Synthetic oligonucleotide
gcacccucauaggccuggatt

SEQ ID NO: 258 - DNA, 21 bp, Artificial Sequence
  Description of Combined DNA/RNA Molecule: Synthetic oligonucleotide
  Description of Artificial Sequence: Synthetic oligonucleotide
uccaggccuaugagggugctt

SEQ ID NO: 259 - DNA, 21 bp, Artificial Sequence
  Description of Combined DNA/RNA Molecule: Synthetic oligonucleotide
  Description of Artificial Sequence: Synthetic oligonucleotide
gcacccucauaggccuggatt

SEQ ID NO: 260 - DNA, 21 bp, Artificial Sequence
  Description of Combined DNA/RNA Molecule: Synthetic oligonucleotide
  Description of Artificial Sequence: Synthetic oligonucleotide
uccaggccuaugagggugctt

SEQ ID NO: 261 - DNA, 21 bp, Artificial Sequence
  Description of Combined DNA/RNA Molecule: Synthetic oligonucleotide
  Description of Artificial Sequence: Synthetic oligonucleotide
uguaucuccuagacaccagtt

SEQ ID NO: 262 - DNA, 21 bp, Artificial Sequence
  Description of Combined DNA/RNA Molecule: Synthetic oligonucleotide
  Description of Artificial Sequence: Synthetic oligonucleotide
cuggugucuaggagauacatt

SEQ ID NO: 263 - DNA, 21 bp, Artificial Sequence
  Description of Combined DNA/RNA Molecule: Synthetic oligonucleotide
  Description of Artificial Sequence: Synthetic oligonucleotide
uguaucuccuagacaccagtt

SEQ ID NO: 264 - DNA, 21 bp, Artificial Sequence
  Description of Combined DNA/RNA Molecule: Synthetic oligonucleotide
  Description of Artificial Sequence: Synthetic oligonucleotide
cuggugucuaggagauacatt

SEQ ID NO: 265 - DNA, 21 bp, Artificial Sequence
  Description of Combined DNA/RNA Molecule: Synthetic oligonucleotide
  Description of Artificial Sequence: Synthetic oligonucleotide
ucuccuagacaccagcauatt

SEQ ID NO: 266 - DNA, 21 bp, Artificial Sequence
  Description of Combined DNA/RNA Molecule: Synthetic oligonucleotide
  Description of Artificial Sequence: Synthetic oligonucleotide
uaugcuggugucuaggagatt

SEQ ID NO: 267 - DNA, 21 bp, Artificial Sequence
  Description of Combined DNA/RNA Molecule: Synthetic oligonucleotide
  Description of Artificial Sequence: Synthetic oligonucleotide
ucuccuagacaccagcauatt

SEQ ID NO: 268 - DNA, 21 bp, Artificial Sequence
  Description of Combined DNA/RNA Molecule: Synthetic oligonucleotide
  Description of Artificial Sequence: Synthetic oligonucleotide
uaugcuggugucuaggagatt

SEQ ID NO: 269 - DNA, 21 bp, Artificial Sequence
  Description of Combined DNA/RNA Molecule: Synthetic oligonucleotide
  Description of Artificial Sequence: Synthetic oligonucleotide
ucuccuagacaccagcauatt

SEQ ID NO: 270 - DNA, 21 bp, Artificial Sequence
  Description of Combined DNA/RNA Molecule: Synthetic oligonucleotide
  Description of Artificial Sequence: Synthetic oligonucleotide
uaugcuggugucuaggagatt

SEQ ID NO: 271 - DNA, 21 bp, Artificial Sequence
  Description of Combined DNA/RNA Molecule: Synthetic oligonucleotide
  Description of Artificial Sequence: Synthetic oligonucleotide
ucuccuagacaccagcauatt

SEQ ID NO: 272 - DNA, 21 bp, Artificial Sequence
  Description of Combined DNA/RNA Molecule: Synthetic oligonucleotide
  Description of Artificial Sequence: Synthetic oligonucleotide
uaugcuggugucuaggagatt

SEQ ID NO: 273 - DNA, 21 bp, Artificial Sequence
  Description of Combined DNA/RNA Molecule: Synthetic oligonucleotide
  Description of Artificial Sequence: Synthetic oligonucleotide
ucuccuagacaccagcauatt

SEQ ID NO: 274 - DNA, 21 bp, Artificial Sequence
  Description of Combined DNA/RNA Molecule: Synthetic oligonucleotide
  Description of Artificial Sequence: Synthetic oligonucleotide
uaugcuggugucuaggagatt

SEQ ID NO: 275 - DNA, 21 bp, Artificial Sequence
  Description of Combined DNA/RNA Molecule: Synthetic oligonucleotide
  Description of Artificial Sequence: Synthetic oligonucleotide
ucuccuagacaccagcauatt

SEQ ID NO: 276 - DNA, 21 bp, Artificial Sequence
  Description of Combined DNA/RNA Molecule: Synthetic oligonucleotide
  Description of Artificial Sequence: Synthetic oligonucleotide
uaugcuggugucuaggagatt

SEQ ID NO: 277 - DNA, 21 bp, Artificial Sequence
  Description of Combined DNA/RNA Molecule: Synthetic oligonucleotide
  Description of Artificial Sequence: Synthetic oligonucleotide
ucuccuaaacaccagcauatt

SEQ ID NO: 278 - DNA, 21 bp, Artificial Sequence
  Description of Combined DNA/RNA Molecule: Synthetic oligonucleotide
  Description of Artificial Sequence: Synthetic oligonucleotide
uaugcuggugucuaggagatt

SEQ ID NO: 279 - DNA, 21 bp, Artificial Sequence
  Description of Combined DNA/RNA Molecule: Synthetic oligonucleotide
  Description of Artificial Sequence: Synthetic oligonucleotide
ucuccuagacaccagcauatt

SEQ ID NO: 280 - DNA, 21 bp, Artificial Sequence
  Description of Combined DNA/RNA Molecule: Synthetic oligonucleotide
  Description of Artificial Sequence: Synthetic oligonucleotide
uaugcuggugucuaggagatt

SEQ ID NO: 281 - DNA, 21 bp, Artificial Sequence
  Description of Combined DNA/RNA Molecule: Synthetic oligonucleotide
  Description of Artificial Sequence: Synthetic oligonucleotide
ucuccuagacaccagcauatt

SEQ ID NO: 282 - DNA, 21 bp, Artificial Sequence
  Description of Combined DNA/RNA Molecule: Synthetic oligonucleotide
  Description of Artificial Sequence: Synthetic oligonucleotide
uaugcuggugucuaggagatt

SEQ ID NO: 283 - DNA, 21 bp, Artificial Sequence
  Description of Combined DNA/RNA Molecule: Synthetic oligonucleotide
  Description of Artificial Sequence: Synthetic oligonucleotide
aggccuggaguuuauucggtt

SEQ ID NO: 284 - DNA, 21 bp, Artificial Sequence
  Description of Combined DNA/RNA Molecule: Synthetic oligonucleotide
  Description of Artificial Sequence: Synthetic oligonucleotide
ccgaauaaacuccaggccutt

SEQ ID NO: 285 - DNA, 21 bp, Artificial Sequence
  Description of Combined DNA/RNA Molecule: Synthetic oligonucleotide
  Description of Artificial Sequence: Synthetic oligonucleotide
aggccuggaguuuauucggtt

SEQ ID NO: 286 - DNA, 21 bp, Artificial Sequence
  Description of Combined DNA/RNA Molecule: Synthetic oligonucleotide
  Description of Artificial Sequence: Synthetic oligonucleotide
ccgaauaaacuccaggccutt

SEQ ID NO: 287 - DNA, 21 bp, Artificial Sequence
  Description of Combined DNA/RNA Molecule: Synthetic oligonucleotide
  Description of Artificial Sequence: Synthetic oligonucleotide
aggccuggaguuuauucggtt

SEQ ID NO: 288 - DNA, 21 bp, Artificial Sequence
  Description of Combined DNA/RNA Molecule: Synthetic oligonucleotide
  Description of Artificial Sequence: Synthetic oligonucleotide
ccgaauaaacuccaggccutt

SEQ ID NO: 289 - DNA, 21 bp, Artificial Sequence
  Description of Combined DNA/RNA Molecule: Synthetic oligonucleotide
  Description of Artificial Sequence: Synthetic oligonucleotide
aggccuggaguuuauucggtt

SEQ ID NO: 290 - DNA, 21 bp, Artificial Sequence
  Description of Combined DNA/RNA Molecule: Synthetic oligonucleotide
  Description of Artificial Sequence: Synthetic oligonucleotide
ccgaauaaacuccaggccutt

SEQ ID NO: 291 - DNA, 21 bp, Artificial Sequence
  Description of Combined DNA/RNA Molecule: Synthetic oligonucleotide
  Description of Artificial Sequence: Synthetic oligonucleotide
aggccuggaguuuauucggtt

SEQ ID NO: 292 - DNA, 21 bp, Artificial Sequence
  Description of Combined DNA/RNA Molecule: Synthetic oligonucleotide
  Description of Artificial Sequence: Synthetic oligonucleotide
ccgaauaaacuccaggccutt

SEQ ID NO: 293 - DNA, 21 bp, Artificial Sequence
  Description of Combined DNA/RNA Molecule: Synthetic oligonucleotide
  Description of Artificial Sequence: Synthetic oligonucleotide
aggccuggaguuuauucggtt

SEQ ID NO: 294 - DNA, 21 bp, Artificial Sequence
  Description of Combined DNA/RNA Molecule: Synthetic oligonucleotide
  Description of Artificial Sequence: Synthetic oligonucleotide
ccgaauaaacuccaggccutt

SEQ ID NO: 295 - DNA, 21 bp, Artificial Sequence
  Description of Combined DNA/RNA Molecule: Synthetic oligonucleotide
  Description of Artificial Sequence: Synthetic oligonucleotide
aggccuggaguuuauucggtt

SEQ ID NO: 296 - DNA, 21 bp, Artificial Sequence
  Description of Combined DNA/RNA Molecule: Synthetic oligonucleotide
  Description of Artificial Sequence: Synthetic oligonucleotide
ccgaauaaacuccaggccutt

SEQ ID NO: 297 - DNA, 21 bp, Artificial Sequence
  Description of Combined DNA/RNA Molecule: Synthetic oligonucleotide
  Description of Artificial Sequence: Synthetic oligonucleotide
cuccuagacaccagcauactt

SEQ ID NO: 298 - DNA, 21 bp, Artificial Sequence
  Description of Combined DNA/RNA Molecule: Synthetic oligonucleotide
  Description of Artificial Sequence: Synthetic oligonucleotide
guaugcuggugucuaggagtt

SEQ ID NO: 299 - DNA, 21 bp, Artificial Sequence
  Description of Combined DNA/RNA Molecule: Synthetic oligonucleotide
  Description of Artificial Sequence: Synthetic oligonucleotide
cuccuagacaccagcauactt

SEQ ID NO: 300 - DNA, 21 bp, Artificial Sequence
  Description of Combined DNA/RNA Molecule: Synthetic oligonucleotide
  Description of Artificial Sequence: Synthetic oligonucleotide
guaugcuggugucuaggagtt

SEQ ID NO: 301 - DNA, 21 bp, Artificial Sequence
  Description of Combined DNA/RNA Molecule: Synthetic oligonucleotide
  Description of Artificial Sequence: Synthetic oligonucleotide
uccuagacaccagcauacatt

SEQ ID NO: 302 - DNA, 21 bp, Artificial Sequence
  Description of Combined DNA/RNA Molecule: Synthetic oligonucleotide
  Description of Artificial Sequence: Synthetic oligonucleotide
uguaugcuggugucuaggatt

SEQ ID NO: 303 - DNA, 21 bp, Artificial Sequence
  Description of Combined DNA/RNA Molecule: Synthetic oligonucleotide
  Description of Artificial Sequence: Synthetic oligonucleotide
uccuagacaccagcauacatt

SEQ ID NO: 304 - DNA, 21 bp, Artificial Sequence
  Description of Combined DNA/RNA Molecule: Synthetic oligonucleotide
  Description of Artificial Sequence: Synthetic oligonucleotide
uguaugcuggugucuaggatt

SEQ ID NO: 305 - DNA, 21 bp, Artificial Sequence
  Description of Combined DNA/RNA Molecule: Synthetic oligonucleotide
  Description of Artificial Sequence: Synthetic oligonucleotide
ccuagacaccagcauacagtt

SEQ ID NO: 306 - DNA, 21 bp, Artificial Sequence
  Description of Combined DNA/RNA Molecule: Synthetic oligonucleotide
  Description of Artificial Sequence: Synthetic oligonucleotide
cuguaugcuggugucuaggtt

SEQ ID NO: 307 - DNA, 21 bp, Artificial Sequence
  Description of Combined DNA/RNA Molecule: Synthetic oligonucleotide
  Description of Artificial Sequence: Synthetic oligonucleotide
ccuagacaccagcauacagtt

SEQ ID NO: 308 - DNA, 21 bp, Artificial Sequence
  Description of Combined DNA/RNA Molecule: Synthetic oligonucleotide
  Description of Artificial Sequence: Synthetic oligonucleotide
cuguaugcuggugucuaggtt

SEQ ID NO: 309 - DNA, 21 bp, Artificial Sequence
  Description of Combined DNA/RNA Molecule: Synthetic oligonucleotide
  Description of Artificial Sequence: Synthetic oligonucleotide
gacaccagcauacagagugtt

SEQ ID NO: 310 - DNA, 21 bp, Artificial Sequence
  Description of Combined DNA/RNA Molecule: Synthetic oligonucleotide
  Description of Artificial Sequence: Synthetic oligonucleotide
cacucuguaugcugguguctt

SEQ ID NO: 311 - DNA, 21 bp, Artificial Sequence
  Description of Combined DNA/RNA Molecule: Synthetic oligonucleotide
  Description of Artificial Sequence: Synthetic oligonucleotide
gacaccagcauacagagugtt

SEQ ID NO: 312 - DNA, 21 bp, Artificial Sequence
  Description of Combined DNA/RNA Molecule: Synthetic oligonucleotide
  Description of Artificial Sequence: Synthetic oligonucleotide
cacucuguaugcugguguctt

SEQ ID NO: 313 - DNA, 21 bp, Artificial Sequence
  Description of Combined DNA/RNA Molecule: Synthetic oligonucleotide
  Description of Artificial Sequence: Synthetic oligonucleotide
cauacagagugaccaccggtt

SEQ ID NO: 314 - DNA, 21 bp, Artificial Sequence
  Description of Combined DNA/RNA Molecule: Synthetic oligonucleotide
  Description of Artificial Sequence: Synthetic oligonucleotide
ccgguggucacucuguaugtt

SEQ ID NO: 315 - DNA, 21 bp, Artificial Sequence
  Description of Combined DNA/RNA Molecule: Synthetic oligonucleotide
  Description of Artificial Sequence: Synthetic oligonucleotide
cauacagagugaccaccggtt

SEQ ID NO: 316 - DNA, 21 bp, Artificial Sequence
  Description of Combined DNA/RNA Molecule: Synthetic oligonucleotide
  Description of Artificial Sequence: Synthetic oligonucleotide
ccgguggucacucuguaugtt

SEQ ID NO: 317 - DNA, 21 bp, Artificial Sequence
  Description of Combined DNA/RNA Molecule: Synthetic oligonucleotide
  Description of Artificial Sequence: Synthetic oligonucleotide
agagugaccaccgggaaautt

SEQ ID NO: 318 - DNA, 21 bp, Artificial Sequence
  Description of Combined DNA/RNA Molecule: Synthetic oligonucleotide
  Description of Artificial Sequence: Synthetic oligonucleotide
auuucccgguggucacucutt

SEQ ID NO: 319 - DNA, 21 bp, Artificial Sequence
  Description of Combined DNA/RNA Molecule: Synthetic oligonucleotide
  Description of Artificial Sequence: Synthetic oligonucleotide
agagugaccaccgggaaautt

SEQ ID NO: 320 - DNA, 21 bp, Artificial Sequence
  Description of Combined DNA/RNA Molecule: Synthetic oligonucleotide
  Description of Artificial Sequence: Synthetic oligonucleotide
auuucccgguggucacucutt

SEQ ID NO: 321 - DNA, 21 bp, Artificial Sequence
  Description of Combined DNA/RNA Molecule: Synthetic oligonucleotide
  Description of Artificial Sequence: Synthetic oligonucleotide
gagugaccaccgggaaauctt

SEQ ID NO: 322 - DNA, 21 bp, Artificial Sequence
  Description of Combined DNA/RNA Molecule: Synthetic oligonucleotide
  Description of Artificial Sequence: Synthetic oligonucleotide
gauuucccgguggucacuctt

SEQ ID NO: 323 - DNA, 21 bp, Artificial Sequence
  Description of Combined DNA/RNA Molecule: Synthetic oligonucleotide
  Description of Artificial Sequence: Synthetic oligonucleotide
gagugaccaccgggaaauctt

SEQ ID NO: 324 - DNA, 21 bp, Artificial Sequence
  Description of Combined DNA/RNA Molecule: Synthetic oligonucleotide
  Description of Artificial Sequence: Synthetic oligonucleotide
gauuucccgguggucacuctt

SEQ ID NO: 325 - DNA, 21 bp, Artificial Sequence
  Description of Combined DNA/RNA Molecule: Synthetic oligonucleotide
  Description of Artificial Sequence: Synthetic oligonucleotide
gugaccaccgggaaaucgatt

SEQ ID NO: 326 - DNA, 21 bp, Artificial Sequence
  Description of Combined DNA/RNA Molecule: Synthetic oligonucleotide
  Description of Artificial Sequence: Synthetic oligonucleotide
ucgauuucccgguggucactt

SEQ ID NO: 327 - DNA, 21 bp, Artificial Sequence
  Description of Combined DNA/RNA Molecule: Synthetic oligonucleotide
  Description of Artificial Sequence: Synthetic oligonucleotide
gugaccaccgggaaaucgatt

SEQ ID NO: 328 - DNA, 21 bp, Artificial Sequence
  Description of Combined DNA/RNA Molecule: Synthetic oligonucleotide
  Description of Artificial Sequence: Synthetic oligonucleotide
ucgauuucccgguggucactt

SEQ ID NO: 329 - DNA, 21 bp, Artificial Sequence
  Description of Combined DNA/RNA Molecule: Synthetic oligonucleotide
  Description of Artificial Sequence: Synthetic oligonucleotide
gaccaccgggaaaucgaggtt

SEQ ID NO: 330 - DNA, 21 bp, Artificial Sequence
  Description of Combined DNA/RNA Molecule: Synthetic oligonucleotide
  Description of Artificial Sequence: Synthetic oligonucleotide
ccucgauuucccggugguctt

SEQ ID NO: 331 - DNA, 21 bp, Artificial Sequence
  Description of Combined DNA/RNA Molecule: Synthetic oligonucleotide
  Description of Artificial Sequence: Synthetic oligonucleotide
gaccaccgggaaaucgaggtt

SEQ ID NO: 332 - DNA, 21 bp, Artificial Sequence
  Description of Combined DNA/RNA Molecule: Synthetic oligonucleotide
  Description of Artificial Sequence: Synthetic oligonucleotide
ccucgauuucccggugguctt

SEQ ID NO: 333 - DNA, 21 bp, Artificial Sequence
  Description of Combined DNA/RNA Molecule: Synthetic oligonucleotide
  Description of Artificial Sequence: Synthetic oligonucleotide
accaccgggaaaucgagggtt

SEQ ID NO: 334 - DNA, 21 bp, Artificial Sequence
  Description of Combined DNA/RNA Molecule: Synthetic oligonucleotide
  Description of Artificial Sequence: Synthetic oligonucleotide
cccucgauuucccgguggutt

SEQ ID NO: 335 - DNA, 21 bp, Artificial Sequence
  Description of Combined DNA/RNA Molecule: Synthetic oligonucleotide
  Description of Artificial Sequence: Synthetic oligonucleotide
accaccgggaaaucgagggtt

SEQ ID NO: 336 - DNA, 21 bp, Artificial Sequence
  Description of Combined DNA/RNA Molecule: Synthetic oligonucleotide
  Description of Artificial Sequence: Synthetic oligonucleotide
cccucgauuucccgguggutt

SEQ ID NO: 337 - DNA, 21 bp, Artificial Sequence
  Description of Combined DNA/RNA Molecule: Synthetic oligonucleotide
  Description of Artificial Sequence: Synthetic oligonucleotide
ccaccgggaaaucgagggctt

SEQ ID NO: 338 - DNA, 21 bp, Artificial Sequence
  Description of Combined DNA/RNA Molecule: Synthetic oligonucleotide
  Description of Artificial Sequence: Synthetic oligonucleotide
gcccucgauuucccgguggtt

SEQ ID NO: 339 - DNA, 21 bp, Artificial Sequence
  Description of Combined DNA/RNA Molecule: Synthetic oligonucleotide
  Description of Artificial Sequence: Synthetic oligonucleotide
ccaccgggaaaucgagggctt

SEQ ID NO: 340 - DNA, 21 bp, Artificial Sequence
  Description of Combined DNA/RNA Molecule: Synthetic oligonucleotide
  Description of Artificial Sequence: Synthetic oligonucleotide
gcccucgauuucccgguggtt

SEQ ID NO: 341 - DNA, 21 bp, Artificial Sequence
  Description of Combined DNA/RNA Molecule: Synthetic oligonucleotide
  Description of Artificial Sequence: Synthetic oligonucleotide
aaaucgagggcagggucautt

SEQ ID NO: 342 - DNA, 21 bp, Artificial Sequence
  Description of Combined DNA/RNA Molecule: Synthetic oligonucleotide
  Description of Artificial Sequence: Synthetic oligonucleotide
augacccugcccucgauuutt

SEQ ID NO: 343 - DNA, 21 bp, Artificial Sequence
  Description of Combined DNA/RNA Molecule: Synthetic oligonucleotide
  Description of Artificial Sequence: Synthetic oligonucleotide
aaaucgagggcagggucautt

SEQ ID NO: 344 - DNA, 21 bp, Artificial Sequence
  Description of Combined DNA/RNA Molecule: Synthetic oligonucleotide
  Description of Artificial Sequence: Synthetic oligonucleotide
augacccugcccucgauuutt

SEQ ID NO: 345 - DNA, 21 bp, Artificial Sequence
  Description of Combined DNA/RNA Molecule: Synthetic oligonucleotide
  Description of Artificial Sequence: Synthetic oligonucleotide
aaaucgagggcagggucautt

SEQ ID NO: 346 - DNA, 21 bp, Artificial Sequence
  Description of Combined DNA/RNA Molecule: Synthetic oligonucleotide
  Description of Artificial Sequence: Synthetic oligonucleotide
augacccugcccucgauuutt

SEQ ID NO: 347 - DNA, 21 bp, Artificial Sequence
  Description of Combined DNA/RNA Molecule: Synthetic oligonucleotide
  Description of Artificial Sequence: Synthetic oligonucleotide
aaaucgagggcagggucautt

SEQ ID NO: 348 - DNA, 21 bp, Artificial Sequence
  Description of Combined DNA/RNA Molecule: Synthetic oligonucleotide
  Description of Artificial Sequence: Synthetic oligonucleotide
augacccugcccucgauuutt

SEQ ID NO: 349 - DNA, 21 bp, Artificial Sequence
  Description of Combined DNA/RNA Molecule: Synthetic oligonucleotide
  Description of Artificial Sequence: Synthetic oligonucleotide
aaaucgagggcagggucautt

SEQ ID NO: 350 - DNA, 21 bp, Artificial Sequence
  Description of Combined DNA/RNA Molecule: Synthetic oligonucleotide
  Description of Artificial Sequence: Synthetic oligonucleotide
augacccugcccucgauuutt

SEQ ID NO: 351 - DNA, 21 bp, Artificial Sequence
  Description of Combined DNA/RNA Molecule: Synthetic oligonucleotide
  Description of Artificial Sequence: Synthetic oligonucleotide
aaaucgagggcagggucautt

SEQ ID NO: 352 - DNA, 21 bp, Artificial Sequence
  Description of Combined DNA/RNA Molecule: Synthetic oligonucleotide
  Description of Artificial Sequence: Synthetic oligonucleotide
augacccugcccucgauuutt

SEQ ID NO: 353 - DNA, 21 bp, Artificial Sequence
  Description of Combined DNA/RNA Molecule: Synthetic oligonucleotide
  Description of Artificial Sequence: Synthetic oligonucleotide
aaaucgagggcagggucautt

SEQ ID NO: 354 - DNA, 21 bp, Artificial Sequence
  Description of Combined DNA/RNA Molecule: Synthetic oligonucleotide
  Description of Artificial Sequence: Synthetic oligonucleotide
augacccugcccucgauuutt

SEQ ID NO: 355 - DNA, 21 bp, Artificial Sequence
  Description of Combined DNA/RNA Molecule: Synthetic oligonucleotide
  Description of Artificial Sequence: Synthetic oligonucleotide
aaaucgagggcagggucautt

SEQ ID NO: 356 - DNA, 21 bp, Artificial Sequence
  Description of Combined DNA/RNA Molecule: Synthetic oligonucleotide
  Description of Artificial Sequence: Synthetic oligonucleotide
augacccugcccucgauuutt

SEQ ID NO: 357 - DNA, 21 bp, Artificial Sequence
  Description of Combined DNA/RNA Molecule: Synthetic oligonucleotide
  Description of Artificial Sequence: Synthetic oligonucleotide
aaaucgagggcagggucautt

SEQ ID NO: 358 - DNA, 21 bp, Artificial Sequence
  Description of Combined DNA/RNA Molecule: Synthetic oligonucleotide
  Description of Artificial Sequence: Synthetic oligonucleotide
augacccugcccucgauuutt

SEQ ID NO: 359 - DNA, 21 bp, Artificial Sequence
  Description of Combined DNA/RNA Molecule: Synthetic oligonucleotide
  Description of Artificial Sequence: Synthetic oligonucleotide
cggcacccucauaggccugtt

SEQ ID NO: 360 - DNA, 21 bp, Artificial Sequence
  Description of Combined DNA/RNA Molecule: Synthetic oligonucleotide
  Description of Artificial Sequence: Synthetic oligonucleotide
caggccuaugagggugccgtt

SEQ ID NO: 361 - DNA, 21 bp, Artificial Sequence
  Description of Combined DNA/RNA Molecule: Synthetic oligonucleotide
  Description of Artificial Sequence: Synthetic oligonucleotide
cggcacccucauaggccugtt

SEQ ID NO: 362 - DNA, 21 bp, Artificial Sequence
  Description of Combined DNA/RNA Molecule: Synthetic oligonucleotide
  Description of Artificial Sequence: Synthetic oligonucleotide
caggccuaugagggugccgtt

SEQ ID NO: 363 - DNA, 21 bp, Artificial Sequence
  Description of Combined DNA/RNA Molecule: Synthetic oligonucleotide
  Description of Artificial Sequence: Synthetic oligonucleotide
cggcacccucauaggccugtt

SEQ ID NO: 364 - DNA, 21 bp, Artificial Sequence
  Description of Combined DNA/RNA Molecule: Synthetic oligonucleotide
  Description of Artificial Sequence: Synthetic oligonucleotide
caggccuaugagggugccgtt

SEQ ID NO: 365 - DNA, 21 bp, Artificial Sequence
  Description of Combined DNA/RNA Molecule: Synthetic oligonucleotide
  Description of Artificial Sequence: Synthetic oligonucleotide
cggcacccucauaggccugtt

SEQ ID NO: 366 - DNA, 21 bp, Artificial Sequence
  Description of Combined DNA/RNA Molecule: Synthetic oligonucleotide
  Description of Artificial Sequence: Synthetic oligonucleotide
caggccuaugagggugccgtt

SEQ ID NO: 367 - DNA, 21 bp, Artificial Sequence
  Description of Combined DNA/RNA Molecule: Synthetic oligonucleotide
  Description of Artificial Sequence: Synthetic oligonucleotide
cggcacccucauaggccugtt

SEQ ID NO: 368 - DNA, 21 bp, Artificial Sequence
  Description of Combined DNA/RNA Molecule: Synthetic oligonucleotide
  Description of Artificial Sequence: Synthetic oligonucleotide
caggccuaugagggugccgtt

SEQ ID NO: 369 - DNA, 21 bp, Artificial Sequence
  Description of Combined DNA/RNA Molecule: Synthetic oligonucleotide
  Description of Artificial Sequence: Synthetic oligonucleotide
cggcacccucauaggccugtt

SEQ ID NO: 370 - DNA, 21 bp, Artificial Sequence
  Description of Combined DNA/RNA Molecule: Synthetic oligonucleotide
  Description of Artificial Sequence: Synthetic oligonucleotide
caggccuaugagggugccgtt

SEQ ID NO: 371 - DNA, 21 bp, Artificial Sequence
  Description of Combined DNA/RNA Molecule: Synthetic oligonucleotide
  Description of Artificial Sequence: Synthetic oligonucleotide
cggcacccucauaggccugtt

SEQ ID NO: 372 - DNA, 21 bp, Artificial Sequence
  Description of Combined DNA/RNA Molecule: Synthetic oligonucleotide
  Description of Artificial Sequence: Synthetic oligonucleotide
caggccuaugagggugccgtt

SEQ ID NO: 373 - DNA, 21 bp, Artificial Sequence
  Description of Combined DNA/RNA Molecule: Synthetic oligonucleotide
  Description of Artificial Sequence: Synthetic oligonucleotide
aucgagggcagggucauggtt

SEQ ID NO: 374 - DNA, 21 bp, Artificial Sequence
  Description of Combined DNA/RNA Molecule: Synthetic oligonucleotide
  Description of Artificial Sequence: Synthetic oligonucleotide
ccaugacccugcccucgautt

SEQ ID NO: 375 - DNA, 21 bp, Artificial Sequence
  Description of Combined DNA/RNA Molecule: Synthetic oligonucleotide
  Description of Artificial Sequence: Synthetic oligonucleotide
aucgagggcagggucauggtt

SEQ ID NO: 376 - DNA, 21 bp, Artificial Sequence
  Description of Combined DNA/RNA Molecule: Synthetic oligonucleotide
  Description of Artificial Sequence: Synthetic oligonucleotide
ccaugacccugcccucgautt

SEQ ID NO: 377 - DNA, 21 bp, Artificial Sequence
  Description of Combined DNA/RNA Molecule: Synthetic oligonucleotide
  Description of Artificial Sequence: Synthetic oligonucleotide
cgagggcagggucaugguctt

SEQ ID NO: 378 - DNA, 21 bp, Artificial Sequence
  Description of Combined DNA/RNA Molecule: Synthetic oligonucleotide
  Description of Artificial Sequence: Synthetic oligonucleotide
gaccaugacccugcccucgtt

SEQ ID NO: 379 - DNA, 21 bp, Artificial Sequence
  Description of Combined DNA/RNA Molecule: Synthetic oligonucleotide
  Description of Artificial Sequence: Synthetic oligonucleotide
gagggcagggucauggucatt

SEQ ID NO: 380 - DNA, 21 bp, Artificial Sequence
  Description of Combined DNA/RNA Molecule: Synthetic oligonucleotide
  Description of Artificial Sequence: Synthetic oligonucleotide
ugaccaugacccugcccuctt

SEQ ID NO: 381 - DNA, 21 bp, Artificial Sequence
  Description of Combined DNA/RNA Molecule: Synthetic oligonucleotide
  Description of Artificial Sequence: Synthetic oligonucleotide
gagggcagggucauggucatt

SEQ ID NO: 382 - DNA, 21 bp, Artificial Sequence
  Description of Combined DNA/RNA Molecule: Synthetic oligonucleotide
  Description of Artificial Sequence: Synthetic oligonucleotide
ugaccaugacccugcccuctt

SEQ ID NO: 383 - DNA, 21 bp, Artificial Sequence
  Description of Combined DNA/RNA Molecule: Synthetic oligonucleotide
  Description of Artificial Sequence: Synthetic oligonucleotide
gggcagggucauggucacctt

SEQ ID NO: 384 - DNA, 21 bp, Artificial Sequence
  Description of Combined DNA/RNA Molecule: Synthetic oligonucleotide
  Description of Artificial Sequence: Synthetic oligonucleotide
ggugaccaugacccugccctt

SEQ ID NO: 385 - DNA, 21 bp, Artificial Sequence
  Description of Combined DNA/RNA Molecule: Synthetic oligonucleotide
  Description of Artificial Sequence: Synthetic oligonucleotide
gggcagggucauggucacctt

SEQ ID NO: 386 - DNA, 21 bp, Artificial Sequence
  Description of Combined DNA/RNA Molecule: Synthetic oligonucleotide
  Description of Artificial Sequence: Synthetic oligonucleotide
ggugaccaugacccugccctt

SEQ ID NO: 387 - DNA, 21 bp, Artificial Sequence
  Description of Combined DNA/RNA Molecule: Synthetic oligonucleotide
  Description of Artificial Sequence: Synthetic oligonucleotide
cagggucauggucaccgactt

SEQ ID NO: 388 - DNA, 21 bp, Artificial Sequence
  Description of Combined DNA/RNA Molecule: Synthetic oligonucleotide
  Description of Artificial Sequence: Synthetic oligonucleotide
gucggugaccaugacccugtt

SEQ ID NO: 389 - DNA, 21 bp, Artificial Sequence
  Description of Combined DNA/RNA Molecule: Synthetic oligonucleotide
  Description of Artificial Sequence: Synthetic oligonucleotide
cagggucauggucaccgactt

SEQ ID NO: 390 - DNA, 21 bp, Artificial Sequence
  Description of Combined DNA/RNA Molecule: Synthetic oligonucleotide
  Description of Artificial Sequence: Synthetic oligonucleotide
gucggugaccaugacccugtt

SEQ ID NO: 391 - DNA, 21 bp, Artificial Sequence
  Description of Combined DNA/RNA Molecule: Synthetic oligonucleotide
  Description of Artificial Sequence: Synthetic oligonucleotide
agggucauggucaccgacutt

SEQ ID NO: 392 - DNA, 21 bp, Artificial Sequence
  Description of Combined DNA/RNA Molecule: Synthetic oligonucleotide
  Description of Artificial Sequence: Synthetic oligonucleotide
agucggugaccaugacccutt

SEQ ID NO: 393 - DNA, 21 bp, Artificial Sequence
  Description of Combined DNA/RNA Molecule: Synthetic oligonucleotide
  Description of Artificial Sequence: Synthetic oligonucleotide
agggucauggucaccgacutt

SEQ ID NO: 394 - DNA, 21 bp, Artificial Sequence
  Description of Combined DNA/RNA Molecule: Synthetic oligonucleotide
  Description of Artificial Sequence: Synthetic oligonucleotide
agucggugaccaugacccutt

SEQ ID NO: 395 - DNA, 21 bp, Artificial Sequence
  Description of Combined DNA/RNA Molecule: Synthetic oligonucleotide
  Description of Artificial Sequence: Synthetic oligonucleotide
auggucaccgacuucgagatt

SEQ ID NO: 396 - DNA, 21 bp, Artificial Sequence
  Description of Combined DNA/RNA Molecule: Synthetic oligonucleotide
  Description of Artificial Sequence: Synthetic oligonucleotide
ucucgaagucggugaccautt

SEQ ID NO: 397 - DNA, 21 bp, Artificial Sequence
  Description of Combined DNA/RNA Molecule: Synthetic oligonucleotide
  Description of Artificial Sequence: Synthetic oligonucleotide
auggucaccgacuucgagatt

SEQ ID NO: 398 - DNA, 21 bp, Artificial Sequence
  Description of Combined DNA/RNA Molecule: Synthetic oligonucleotide
  Description of Artificial Sequence: Synthetic oligonucleotide
ucucgaagucggugaccautt

SEQ ID NO: 399 - DNA, 21 bp, Artificial Sequence
  Description of Combined DNA/RNA Molecule: Synthetic oligonucleotide
  Description of Artificial Sequence: Synthetic oligonucleotide
ccgacuucgagaaugugcctt

SEQ ID NO: 400 - DNA, 21 bp, Artificial Sequence
  Description of Combined DNA/RNA Molecule: Synthetic oligonucleotide
  Description of Artificial Sequence: Synthetic oligonucleotide
ggcacauucucgaagucggtt

SEQ ID NO: 401 - DNA, 21 bp, Artificial Sequence
  Description of Combined DNA/RNA Molecule: Synthetic oligonucleotide
  Description of Artificial Sequence: Synthetic oligonucleotide
ggaggacgggacccgcuuctt

SEQ ID NO: 402 - DNA, 21 bp, Artificial Sequence
  Description of Combined DNA/RNA Molecule: Synthetic oligonucleotide
  Description of Artificial Sequence: Synthetic oligonucleotide
gaagcgggucccguccucctt

SEQ ID NO: 403 - DNA, 21 bp, Artificial Sequence
  Description of Combined DNA/RNA Molecule: Synthetic oligonucleotide
  Description of Artificial Sequence: Synthetic oligonucleotide
cagcggccgggaugccggctt

SEQ ID NO: 404 - DNA, 21 bp, Artificial Sequence
  Description of Combined DNA/RNA Molecule: Synthetic oligonucleotide
  Description of Artificial Sequence: Synthetic oligonucleotide
gccggcaucccggccgcugtt

SEQ ID NO: 405 - DNA, 21 bp, Artificial Sequence
  Description of Combined DNA/RNA Molecule: Synthetic oligonucleotide
  Description of Artificial Sequence: Synthetic oligonucleotide
cagcggccgggaugccggctt

SEQ ID NO: 406 - DNA, 21 bp, Artificial Sequence
  Description of Combined DNA/RNA Molecule: Synthetic oligonucleotide
  Description of Artificial Sequence: Synthetic oligonucleotide
gccggcaucccggccgcugtt

SEQ ID NO: 407 - DNA, 21 bp, Artificial Sequence
  Description of Combined DNA/RNA Molecule: Synthetic oligonucleotide
  Description of Artificial Sequence: Synthetic oligonucleotide
gggugccagcaugcgcagctt

SEQ ID NO: 408 - DNA, 21 bp, Artificial Sequence
  Description of Combined DNA/RNA Molecule: Synthetic oligonucleotide
  Description of Artificial Sequence: Synthetic oligonucleotide
gcugcgcaugcuggcaccctt

SEQ ID NO: 409 - DNA, 21 bp, Artificial Sequence
  Description of Combined DNA/RNA Molecule: Synthetic oligonucleotide
  Description of Artificial Sequence: Synthetic oligonucleotide
ccugcgcgugcucaacugctt

SEQ ID NO: 410 - DNA, 21 bp, Artificial Sequence
  Description of Combined DNA/RNA Molecule: Synthetic oligonucleotide
  Description of Artificial Sequence: Synthetic oligonucleotide
gcaguugagcacgcgcaggtt

SEQ ID NO: 411 - DNA, 21 bp, Artificial Sequence
  Description of Combined DNA/RNA Molecule: Synthetic oligonucleotide
  Description of Artificial Sequence: Synthetic oligonucleotide
ccugcgcgugcucaacugctt

SEQ ID NO: 412 - DNA, 21 bp, Artificial Sequence
  Description of Combined DNA/RNA Molecule: Synthetic oligonucleotide
  Description of Artificial Sequence: Synthetic oligonucleotide
gcaguugagcacgcgcaggtt

SEQ ID NO: 413 - DNA, 21 bp, Artificial Sequence
  Description of Combined DNA/RNA Molecule: Synthetic oligonucleotide
  Description of Artificial Sequence: Synthetic oligonucleotide
ugcgcgugcucaacugccatt

SEQ ID NO: 414 - DNA, 21 bp, Artificial Sequence
  Description of Combined DNA/RNA Molecule: Synthetic oligonucleotide
  Description of Artificial Sequence: Synthetic oligonucleotide
uggcaguugagcacgcgcatt

SEQ ID NO: 415 - DNA, 21 bp, Artificial Sequence
  Description of Combined DNA/RNA Molecule: Synthetic oligonucleotide
  Description of Artificial Sequence: Synthetic oligonucleotide
ugcgcgugcucaacugccatt

SEQ ID NO: 416 - DNA, 21 bp, Artificial Sequence
  Description of Combined DNA/RNA Molecule: Synthetic oligonucleotide
  Description of Artificial Sequence: Synthetic oligonucleotide
uggcaguugagcacgcgcatt

SEQ ID NO: 417 - DNA, 21 bp, Artificial Sequence
  Description of Combined DNA/RNA Molecule: Synthetic oligonucleotide
  Description of Artificial Sequence: Synthetic oligonucleotide
cgcgugcucaacugccaagtt

SEQ ID NO: 418 - DNA, 21 bp, Artificial Sequence
  Description of Combined DNA/RNA Molecule: Synthetic oligonucleotide
  Description of Artificial Sequence: Synthetic oligonucleotide
cuuggcaguugagcacgcgtt

SEQ ID NO: 419 - DNA, 21 bp, Artificial Sequence
  Description of Combined DNA/RNA Molecule: Synthetic oligonucleotide
  Description of Artificial Sequence: Synthetic oligonucleotide
cgcgugcucaacugccaagtt

SEQ ID NO: 420 - DNA, 21 bp, Artificial Sequence
  Description of Combined DNA/RNA Molecule: Synthetic oligonucleotide
  Description of Artificial Sequence: Synthetic oligonucleotide
cuuggcaguugagcacgcgtt

SEQ ID NO: 421 - DNA, 21 bp, Artificial Sequence
  Description of Combined DNA/RNA Molecule: Synthetic oligonucleotide
  Description of Artificial Sequence: Synthetic oligonucleotide
cugccaagggaagggcacgtt

SEQ ID NO: 422 - DNA, 21 bp, Artificial Sequence
  Description of Combined DNA/RNA Molecule: Synthetic oligonucleotide
  Description of Artificial Sequence: Synthetic oligonucleotide
cgugcccuucccuuggcagtt

SEQ ID NO: 423 - DNA, 21 bp, Artificial Sequence
  Description of Combined DNA/RNA Molecule: Synthetic oligonucleotide
  Description of Artificial Sequence: Synthetic oligonucleotide
cugccaagggaagggcacgtt

SEQ ID NO: 424 - DNA, 21 bp, Artificial Sequence
  Description of Combined DNA/RNA Molecule: Synthetic oligonucleotide
  Description of Artificial Sequence: Synthetic oligonucleotide
cgugcccuucccuuggcagtt

SEQ ID NO: 425 - DNA, 21 bp, Artificial Sequence
  Description of Combined DNA/RNA Molecule: Synthetic oligonucleotide
  Description of Artificial Sequence: Synthetic oligonucleotide
caagggaagggcacgguuatt

SEQ ID NO: 426 - DNA, 21 bp, Artificial Sequence
  Description of Combined DNA/RNA Molecule: Synthetic oligonucleotide
  Description of Artificial Sequence: Synthetic oligonucleotide
uaaccgugcccuucccuugtt

SEQ ID NO: 427 - DNA, 21 bp, Artificial Sequence
  Description of Combined DNA/RNA Molecule: Synthetic oligonucleotide
  Description of Artificial Sequence: Synthetic oligonucleotide
aagggaagggcacgguuagtt

SEQ ID NO: 428 - DNA, 21 bp, Artificial Sequence
  Description of Combined DNA/RNA Molecule: Synthetic oligonucleotide
  Description of Artificial Sequence: Synthetic oligonucleotide
cuaaccgugcccuucccuutt

SEQ ID NO: 429 - DNA, 21 bp, Artificial Sequence
  Description of Combined DNA/RNA Molecule: Synthetic oligonucleotide
  Description of Artificial Sequence: Synthetic oligonucleotide
agggaagggcacgguuagctt

SEQ ID NO: 430 - DNA, 21 bp, Artificial Sequence
  Description of Combined DNA/RNA Molecule: Synthetic oligonucleotide
  Description of Artificial Sequence: Synthetic oligonucleotide
gcuaaccgugcccuucccutt

SEQ ID NO: 431 - DNA, 21 bp, Artificial Sequence
  Description of Combined DNA/RNA Molecule: Synthetic oligonucleotide
  Description of Artificial Sequence: Synthetic oligonucleotide
gggaagggcacgguuagcgtt

SEQ ID NO: 432 - DNA, 21 bp, Artificial Sequence
  Description of Combined DNA/RNA Molecule: Synthetic oligonucleotide
  Description of Artificial Sequence: Synthetic oligonucleotide
cgcuaaccgugcccuuccctt

SEQ ID NO: 433 - DNA, 21 bp, Artificial Sequence
  Description of Combined DNA/RNA Molecule: Synthetic oligonucleotide
  Description of Artificial Sequence: Synthetic oligonucleotide
ggaagggcacgguuagcggtt

SEQ ID NO: 434 - DNA, 21 bp, Artificial Sequence
  Description of Combined DNA/RNA Molecule: Synthetic oligonucleotide
  Description of Artificial Sequence: Synthetic oligonucleotide
ccgcuaaccgugcccuucctt

SEQ ID NO: 435 - DNA, 21 bp, Artificial Sequence
  Description of Combined DNA/RNA Molecule: Synthetic oligonucleotide
  Description of Artificial Sequence: Synthetic oligonucleotide
gaagggcacgguuagcggctt

SEQ ID NO: 436 - DNA, 21 bp, Artificial Sequence
  Description of Combined DNA/RNA Molecule: Synthetic oligonucleotide
  Description of Artificial Sequence: Synthetic oligonucleotide
gccgcuaaccgugcccuuctt

SEQ ID NO: 437 - DNA, 21 bp, Artificial Sequence
  Description of Combined DNA/RNA Molecule: Synthetic oligonucleotide
  Description of Artificial Sequence: Synthetic oligonucleotide
aagggcacgguuagcggcatt

SEQ ID NO: 438 - DNA, 21 bp, Artificial Sequence
  Description of Combined DNA/RNA Molecule: Synthetic oligonucleotide
  Description of Artificial Sequence: Synthetic oligonucleotide
ugccgcuaaccgugcccuutt

SEQ ID NO: 439 - DNA, 21 bp, Artificial Sequence
  Description of Combined DNA/RNA Molecule: Synthetic oligonucleotide
  Description of Artificial Sequence: Synthetic oligonucleotide
agggcacgguuagcggcactt

SEQ ID NO: 440 - DNA, 21 bp, Artificial Sequence
  Description of Combined DNA/RNA Molecule: Synthetic oligonucleotide
  Description of Artificial Sequence: Synthetic oligonucleotide
gugccgcuaaccgugcccutt

SEQ ID NO: 441 - DNA, 21 bp, Artificial Sequence
  Description of Combined DNA/RNA Molecule: Synthetic oligonucleotide
  Description of Artificial Sequence: Synthetic oligonucleotide
cacgguuagcggcacccuctt

SEQ ID NO: 442 - DNA, 21 bp, Artificial Sequence
  Description of Combined DNA/RNA Molecule: Synthetic oligonucleotide
  Description of Artificial Sequence: Synthetic oligonucleotide
gagggugccgcuaaccgugtt

SEQ ID NO: 443 - DNA, 21 bp, Artificial Sequence
  Description of Combined DNA/RNA Molecule: Synthetic oligonucleotide
  Description of Artificial Sequence: Synthetic oligonucleotide
acgguuagcggcacccucatt

SEQ ID NO: 444 - DNA, 21 bp, Artificial Sequence
  Description of Combined DNA/RNA Molecule: Synthetic oligonucleotide
  Description of Artificial Sequence: Synthetic oligonucleotide
ugagggugccgcuaaccgutt

SEQ ID NO: 445 - DNA, 21 bp, Artificial Sequence
  Description of Combined DNA/RNA Molecule: Synthetic oligonucleotide
  Description of Artificial Sequence: Synthetic oligonucleotide
guuagcggcacccucauagtt

SEQ ID NO: 446 - DNA, 21 bp, Artificial Sequence
  Description of Combined DNA/RNA Molecule: Synthetic oligonucleotide
  Description of Artificial Sequence: Synthetic oligonucleotide
cuaugagggugccgcuaactt

SEQ ID NO: 447 - DNA, 21 bp, Artificial Sequence
  Description of Combined DNA/RNA Molecule: Synthetic oligonucleotide
  Description of Artificial Sequence: Synthetic oligonucleotide
uuagcggcacccucauaggtt

SEQ ID NO: 448 - DNA, 21 bp, Artificial Sequence
  Description of Combined DNA/RNA Molecule: Synthetic oligonucleotide
  Description of Artificial Sequence: Synthetic oligonucleotide
ccuaugagggugccgcuaatt

SEQ ID NO: 449 - DNA, 21 bp, Artificial Sequence
  Description of Combined DNA/RNA Molecule: Synthetic oligonucleotide
  Description of Artificial Sequence: Synthetic oligonucleotide
gcggcacccucauaggccutt

SEQ ID NO: 450 - DNA, 21 bp, Artificial Sequence
  Description of Combined DNA/RNA Molecule: Synthetic oligonucleotide
  Description of Artificial Sequence: Synthetic oligonucleotide
aggccuaugagggugccgctt

SEQ ID NO: 451 - DNA, 21 bp, Artificial Sequence
  Description of Combined DNA/RNA Molecule: Synthetic oligonucleotide
  Description of Artificial Sequence: Synthetic oligonucleotide
gcacccucauaggccuggatt

SEQ ID NO: 452 - DNA, 21 bp, Artificial Sequence
  Description of Combined DNA/RNA Molecule: Synthetic oligonucleotide
  Description of Artificial Sequence: Synthetic oligonucleotide
uccaggccuaugagggugctt

SEQ ID NO: 453 - DNA, 21 bp, Artificial Sequence
  Description of Combined DNA/RNA Molecule: Synthetic oligonucleotide
  Description of Artificial Sequence: Synthetic oligonucleotide
ucauaggccuggaguuuautt

SEQ ID NO: 454 - DNA, 21 bp, Artificial Sequence
  Description of Combined DNA/RNA Molecule: Synthetic oligonucleotide
  Description of Artificial Sequence: Synthetic oligonucleotide
auaaacuccaggccuaugatt

SEQ ID NO: 455 - DNA, 21 bp, Artificial Sequence
  Description of Combined DNA/RNA Molecule: Synthetic oligonucleotide
  Description of Artificial Sequence: Synthetic oligonucleotide
ggccuggaguuuauucggatt

SEQ ID NO: 456 - DNA, 21 bp, Artificial Sequence
  Description of Combined DNA/RNA Molecule: Synthetic oligonucleotide
  Description of Artificial Sequence: Synthetic oligonucleotide
uccgaauaaacuccaggcctt

SEQ ID NO: 457 - DNA, 21 bp, Artificial Sequence
  Description of Combined DNA/RNA Molecule: Synthetic oligonucleotide
  Description of Artificial Sequence: Synthetic oligonucleotide
gccuggaguuuauucggaatt

SEQ ID NO: 458 - DNA, 21 bp, Artificial Sequence
  Description of Combined DNA/RNA Molecule: Synthetic oligonucleotide
  Description of Artificial Sequence: Synthetic oligonucleotide
uuccgaauaaacuccaggctt

SEQ ID NO: 459 - DNA, 21 bp, Artificial Sequence
  Description of Combined DNA/RNA Molecule: Synthetic oligonucleotide
  Description of Artificial Sequence: Synthetic oligonucleotide
gccuggaguuuauucggaatt

SEQ ID NO: 460 - DNA, 21 bp, Artificial Sequence
  Description of Combined DNA/RNA Molecule: Synthetic oligonucleotide
  Description of Artificial Sequence: Synthetic oligonucleotide
uuccgaauaaacuccaggctt

SEQ ID NO: 461 - DNA, 21 bp, Artificial Sequence
  Description of Combined DNA/RNA Molecule: Synthetic oligonucleotide
  Description of Artificial Sequence: Synthetic oligonucleotide
gccuggaguuuauucggaatt

SEQ ID NO: 462 - DNA, 20 bp, Artificial Sequence
  Description of Combined DNA/RNA Molecule: Synthetic oligonucleotide
  Description of Artificial Sequence: Synthetic oligonucleotide
uuccgaauaacuccaggctt

SEQ ID NO: 463 - DNA, 21 bp, Artificial Sequence
  Description of Combined DNA/RNA Molecule: Synthetic oligonucleotide
  Description of Artificial Sequence: Synthetic oligonucleotide
cuggaguuuauucggaaaatt

SEQ ID NO: 464 - DNA, 21 bp, Artificial Sequence
  Description of Combined DNA/RNA Molecule: Synthetic oligonucleotide
  Description of Artificial Sequence: Synthetic oligonucleotide
uuuuccgaauaaacuccagtt

SEQ ID NO: 465 - DNA, 21 bp, Artificial Sequence
  Description of Combined DNA/RNA Molecule: Synthetic oligonucleotide
  Description of Artificial Sequence: Synthetic oligonucleotide
cuggaguuuauucggaaaatt

SEQ ID NO: 466 - DNA, 21 bp, Artificial Sequence
  Description of Combined DNA/RNA Molecule: Synthetic oligonucleotide
  Description of Artificial Sequence: Synthetic oligonucleotide
uuuuccgaauaaacuccagtt

SEQ ID NO: 467 - DNA, 21 bp, Artificial Sequence
  Description of Combined DNA/RNA Molecule: Synthetic oligonucleotide
  Description of Artificial Sequence: Synthetic oligonucleotide
ggaguuuauucggaaaagctt

SEQ ID NO: 468 - DNA, 21 bp, Artificial Sequence
  Description of Combined DNA/RNA Molecule: Synthetic oligonucleotide
  Description of Artificial Sequence: Synthetic oligonucleotide
gcuuuuccgaauaaacucctt

SEQ ID NO: 469 - DNA, 21 bp, Artificial Sequence
  Description of Combined DNA/RNA Molecule: Synthetic oligonucleotide
  Description of Artificial Sequence: Synthetic oligonucleotide
ggaguuuauucggaaaagctt

SEQ ID NO: 470 - DNA, 21 bp, Artificial Sequence
  Description of Combined DNA/RNA Molecule: Synthetic oligonucleotide
  Description of Artificial Sequence: Synthetic oligonucleotide
gcuuuuccgaauaaacucctt

SEQ ID NO: 471 - DNA, 21 bp, Artificial Sequence
  Description of Combined DNA/RNA Molecule: Synthetic oligonucleotide
  Description of Artificial Sequence: Synthetic oligonucleotide
gaguuuauucggaaaagcctt

SEQ ID NO: 472 - DNA, 21 bp, Artificial Sequence
  Description of Combined DNA/RNA Molecule: Synthetic oligonucleotide
  Description of Artificial Sequence: Synthetic oligonucleotide
ggcuuuuccgaauaaacuctt

SEQ ID NO: 473 - DNA, 21 bp, Artificial Sequence
  Description of Combined DNA/RNA Molecule: Synthetic oligonucleotide
  Description of Artificial Sequence: Synthetic oligonucleotide
gaguuuauucggaaaagcctt

SEQ ID NO: 474 - DNA, 21 bp, Artificial Sequence
  Description of Combined DNA/RNA Molecule: Synthetic oligonucleotide
  Description of Artificial Sequence: Synthetic oligonucleotide
ggcuuuuccgaauaaacuctt

SEQ ID NO: 475 - DNA, 21 bp, Artificial Sequence
  Description of Combined DNA/RNA Molecule: Synthetic oligonucleotide
  Description of Artificial Sequence: Synthetic oligonucleotide
uuauucggaaaagccagcutt

SEQ ID NO: 476 - DNA, 21 bp, Artificial Sequence
  Description of Combined DNA/RNA Molecule: Synthetic oligonucleotide
  Description of Artificial Sequence: Synthetic oligonucleotide
agcuggcuuuuccgaauaatt

SEQ ID NO: 477 - DNA, 21 bp, Artificial Sequence
  Description of Combined DNA/RNA Molecule: Synthetic oligonucleotide
  Description of Artificial Sequence: Synthetic oligonucleotide
uuauucggaaaagccagcutt

SEQ ID NO: 478 - DNA, 21 bp, Artificial Sequence
  Description of Combined DNA/RNA Molecule: Synthetic oligonucleotide
  Description of Artificial Sequence: Synthetic oligonucleotide
agcuggcuuuuccgaauaatt

SEQ ID NO: 479 - DNA, 21 bp, Artificial Sequence
  Description of Combined DNA/RNA Molecule: Synthetic oligonucleotide
  Description of Artificial Sequence: Synthetic oligonucleotide
cccuggcggguggguacagtt

SEQ ID NO: 480 - DNA, 21 bp, Artificial Sequence
  Description of Combined DNA/RNA Molecule: Synthetic oligonucleotide
  Description of Artificial Sequence: Synthetic oligonucleotide
cuguacccacccgccagggtt

SEQ ID NO: 481 - DNA, 21 bp, Artificial Sequence
  Description of Combined DNA/RNA Molecule: Synthetic oligonucleotide
  Description of Artificial Sequence: Synthetic oligonucleotide
cccuggcggguggguacagtt

SEQ ID NO: 482 - DNA, 21 bp, Artificial Sequence
  Description of Combined DNA/RNA Molecule: Synthetic oligonucleotide
  Description of Artificial Sequence: Synthetic oligonucleotide
cuguacccacccgccagggtt

SEQ ID NO: 483 - DNA, 21 bp, Artificial Sequence
  Description of Combined DNA/RNA Molecule: Synthetic oligonucleotide
  Description of Artificial Sequence: Synthetic oligonucleotide
ccuggcggguggguacagctt

SEQ ID NO: 484 - DNA, 21 bp, Artificial Sequence
  Description of Combined DNA/RNA Molecule: Synthetic oligonucleotide
  Description of Artificial Sequence: Synthetic oligonucleotide
gcuguacccacccgccaggtt

SEQ ID NO: 485 - DNA, 21 bp, Artificial Sequence
  Description of Combined DNA/RNA Molecule: Synthetic oligonucleotide
  Description of Artificial Sequence: Synthetic oligonucleotide
uggcggguggguacagccgtt

SEQ ID NO: 486 - DNA, 21 bp, Artificial Sequence
  Description of Combined DNA/RNA Molecule: Synthetic oligonucleotide
  Description of Artificial Sequence: Synthetic oligonucleotide
cggcuguacccacccgccatt

SEQ ID NO: 487 - DNA, 21 bp, Artificial Sequence
  Description of Combined DNA/RNA Molecule: Synthetic oligonucleotide
  Description of Artificial Sequence: Synthetic oligonucleotide
uggcggguggguacagccgtt

SEQ ID NO: 488 - DNA, 21 bp, Artificial Sequence
  Description of Combined DNA/RNA Molecule: Synthetic oligonucleotide
  Description of Artificial Sequence: Synthetic oligonucleotide
cggcuguacccacccgccatt

SEQ ID NO: 489 - DNA, 21 bp, Artificial Sequence
  Description of Combined DNA/RNA Molecule: Synthetic oligonucleotide
  Description of Artificial Sequence: Synthetic oligonucleotide
ggcggguggguacagccgctt

SEQ ID NO: 490 - DNA, 21 bp, Artificial Sequence
  Description of Combined DNA/RNA Molecule: Synthetic oligonucleotide
  Description of Artificial Sequence: Synthetic oligonucleotide
gcggcuguacccacccgcctt

SEQ ID NO: 491 - DNA, 21 bp, Artificial Sequence
  Description of Combined DNA/RNA Molecule: Synthetic oligonucleotide
  Description of Artificial Sequence: Synthetic oligonucleotide
gguggguacagccgcgucctt

SEQ ID NO: 492 - DNA, 21 bp, Artificial Sequence
  Description of Combined DNA/RNA Molecule: Synthetic oligonucleotide
  Description of Artificial Sequence: Synthetic oligonucleotide
ggacgcggcuguacccacctt

SEQ ID NO: 493 - DNA, 21 bp, Artificial Sequence
  Description of Combined DNA/RNA Molecule: Synthetic oligonucleotide
  Description of Artificial Sequence: Synthetic oligonucleotide
uggguacagccgcguccuctt

SEQ ID NO: 494 - DNA, 21 bp, Artificial Sequence
  Description of Combined DNA/RNA Molecule: Synthetic oligonucleotide
  Description of Artificial Sequence: Synthetic oligonucleotide
gaggacgcggcuguacccatt

SEQ ID NO: 495 - DNA, 21 bp, Artificial Sequence
  Description of Combined DNA/RNA Molecule: Synthetic oligonucleotide
  Description of Artificial Sequence: Synthetic oligonucleotide
gccgcguccucaacgccgctt

SEQ ID NO: 496 - DNA, 21 bp, Artificial Sequence
  Description of Combined DNA/RNA Molecule: Synthetic oligonucleotide
  Description of Artificial Sequence: Synthetic oligonucleotide
gcggcguugaggacgcggctt

SEQ ID NO: 497 - DNA, 21 bp, Artificial Sequence
  Description of Combined DNA/RNA Molecule: Synthetic oligonucleotide
  Description of Artificial Sequence: Synthetic oligonucleotide
ccgcguccucaacgccgcctt

SEQ ID NO: 498 - DNA, 21 bp, Artificial Sequence
  Description of Combined DNA/RNA Molecule: Synthetic oligonucleotide
  Description of Artificial Sequence: Synthetic oligonucleotide
ggcggcguugaggacgcggtt

SEQ ID NO: 499 - DNA, 21 bp, Artificial Sequence
  Description of Combined DNA/RNA Molecule: Synthetic oligonucleotide
  Description of Artificial Sequence: Synthetic oligonucleotide
gucgugcuggucaccgcugtt

SEQ ID NO: 500 - DNA, 21 bp, Artificial Sequence
  Description of Combined DNA/RNA Molecule: Synthetic oligonucleotide
  Description of Artificial Sequence: Synthetic oligonucleotide
cagcggugaccagcacgactt

SEQ ID NO: 501 - DNA, 21 bp, Artificial Sequence
  Description of Combined DNA/RNA Molecule: Synthetic oligonucleotide
  Description of Artificial Sequence: Synthetic oligonucleotide
gucgugcuggucaccgcugtt

SEQ ID NO: 502 - DNA, 21 bp, Artificial Sequence
  Description of Combined DNA/RNA Molecule: Synthetic oligonucleotide
  Description of Artificial Sequence: Synthetic oligonucleotide
cagcggugaccagcacgactt

SEQ ID NO: 503 - DNA, 21 bp, Artificial Sequence
  Description of Combined DNA/RNA Molecule: Synthetic oligonucleotide
  Description of Artificial Sequence: Synthetic oligonucleotide
ucgugcuggucaccgcugctt

SEQ ID NO: 504 - DNA, 21 bp, Artificial Sequence
  Description of Combined DNA/RNA Molecule: Synthetic oligonucleotide
  Description of Artificial Sequence: Synthetic oligonucleotide
gcagcggugaccagcacgatt

SEQ ID NO: 505 - DNA, 21 bp, Artificial Sequence
  Description of Combined DNA/RNA Molecule: Synthetic oligonucleotide
  Description of Artificial Sequence: Synthetic oligonucleotide
ucgugcuggucaccgcugctt

SEQ ID NO: 506 - DNA, 21 bp, Artificial Sequence
  Description of Combined DNA/RNA Molecule: Synthetic oligonucleotide
  Description of Artificial Sequence: Synthetic oligonucleotide
gcagcggugaccagcacgatt

SEQ ID NO: 507 - DNA, 21 bp, Artificial Sequence
  Description of Combined DNA/RNA Molecule: Synthetic oligonucleotide
  Description of Artificial Sequence: Synthetic oligonucleotide
uggucaccgcugccggcaatt

SEQ ID NO: 508 - DNA, 21 bp, Artificial Sequence
  Description of Combined DNA/RNA Molecule: Synthetic oligonucleotide
  Description of Artificial Sequence: Synthetic oligonucleotide
uugccggcagcggugaccatt

SEQ ID NO: 509 - DNA, 21 bp, Artificial Sequence
  Description of Combined DNA/RNA Molecule: Synthetic oligonucleotide
  Description of Artificial Sequence: Synthetic oligonucleotide
uggucaccgcugccggcaatt

SEQ ID NO: 510 - DNA, 21 bp, Artificial Sequence
  Description of Combined DNA/RNA Molecule: Synthetic oligonucleotide
  Description of Artificial Sequence: Synthetic oligonucleotide
uugccggcagcggugaccatt

SEQ ID NO: 511 - DNA, 21 bp, Artificial Sequence
  Description of Combined DNA/RNA Molecule: Synthetic oligonucleotide
  Description of Artificial Sequence: Synthetic oligonucleotide
ggucaccgcugccggcaactt

SEQ ID NO: 512 - DNA, 21 bp, Artificial Sequence
  Description of Combined DNA/RNA Molecule: Synthetic oligonucleotide
  Description of Artificial Sequence: Synthetic oligonucleotide
guugccggcagcggugacctt

SEQ ID NO: 513 - DNA, 21 bp, Artificial Sequence
  Description of Combined DNA/RNA Molecule: Synthetic oligonucleotide
  Description of Artificial Sequence: Synthetic oligonucleotide
ggucaccgcugccggcaactt

SEQ ID NO: 514 - DNA, 21 bp, Artificial Sequence
  Description of Combined DNA/RNA Molecule: Synthetic oligonucleotide
  Description of Artificial Sequence: Synthetic oligonucleotide
guugccggcagcggugacctt

SEQ ID NO: 515 - DNA, 21 bp, Artificial Sequence
  Description of Combined DNA/RNA Molecule: Synthetic oligonucleotide
  Description of Artificial Sequence: Synthetic oligonucleotide
caccgcugccggcaacuuctt

SEQ ID NO: 516 - DNA, 21 bp, Artificial Sequence
  Description of Combined DNA/RNA Molecule: Synthetic oligonucleotide
  Description of Artificial Sequence: Synthetic oligonucleotide
gaaguugccggcagcggugtt

SEQ ID NO: 517 - DNA, 21 bp, Artificial Sequence
  Description of Combined DNA/RNA Molecule: Synthetic oligonucleotide
  Description of Artificial Sequence: Synthetic oligonucleotide
caccgcugccggcaacuuctt

SEQ ID NO: 518 - DNA, 21 bp, Artificial Sequence
  Description of Combined DNA/RNA Molecule: Synthetic oligonucleotide
  Description of Artificial Sequence: Synthetic oligonucleotide
gaaguugccggcagcggugtt

SEQ ID NO: 519 - DNA, 21 bp, Artificial Sequence
  Description of Combined DNA/RNA Molecule: Synthetic oligonucleotide
  Description of Artificial Sequence: Synthetic oligonucleotide
ccgcugccggcaacuuccgtt

SEQ ID NO: 520 - DNA, 21 bp, Artificial Sequence
  Description of Combined DNA/RNA Molecule: Synthetic oligonucleotide
  Description of Artificial Sequence: Synthetic oligonucleotide
cggaaguugccggcagcggtt

SEQ ID NO: 521 - DNA, 21 bp, Artificial Sequence
  Description of Combined DNA/RNA Molecule: Synthetic oligonucleotide
  Description of Artificial Sequence: Synthetic oligonucleotide
ccgcugccggcaacuuccgtt

SEQ ID NO: 522 - DNA, 21 bp, Artificial Sequence
  Description of Combined DNA/RNA Molecule: Synthetic oligonucleotide
  Description of Artificial Sequence: Synthetic oligonucleotide
cggaaguugccggcagcggtt

SEQ ID NO: 523 - DNA, 21 bp, Artificial Sequence
  Description of Combined DNA/RNA Molecule: Synthetic oligonucleotide
  Description of Artificial Sequence: Synthetic oligonucleotide
cgcugccggcaacuuccggtt

SEQ ID NO: 524 - DNA, 21 bp, Artificial Sequence
  Description of Combined DNA/RNA Molecule: Synthetic oligonucleotide
  Description of Artificial Sequence: Synthetic oligonucleotide
ccggaaguugccggcagcgtt

SEQ ID NO: 525 - DNA, 21 bp, Artificial Sequence
  Description of Combined DNA/RNA Molecule: Synthetic oligonucleotide
  Description of Artificial Sequence: Synthetic oligonucleotide
cgcugccggcaacuuccggtt

SEQ ID NO: 526 - DNA, 21 bp, Artificial Sequence
  Description of Combined DNA/RNA Molecule: Synthetic oligonucleotide
  Description of Artificial Sequence: Synthetic oligonucleotide
ccggaaguugccggcagcgtt

SEQ ID NO: 527 - DNA, 21 bp, Artificial Sequence
  Description of Combined DNA/RNA Molecule: Synthetic oligonucleotide
  Description of Artificial Sequence: Synthetic oligonucleotide
gcugccggcaacuuccgggtt

SEQ ID NO: 528 - DNA, 21 bp, Artificial Sequence
  Description of Combined DNA/RNA Molecule: Synthetic oligonucleotide
  Description of Artificial Sequence: Synthetic oligonucleotide
cccggaaguugccggcagctt

SEQ ID NO: 529 - DNA, 21 bp, Artificial Sequence
  Description of Combined DNA/RNA Molecule: Synthetic oligonucleotide
  Description of Artificial Sequence: Synthetic oligonucleotide
gcugccggcaacuuccgggtt

SEQ ID NO: 530 - DNA, 21 bp, Artificial Sequence
  Description of Combined DNA/RNA Molecule: Synthetic oligonucleotide
  Description of Artificial Sequence: Synthetic oligonucleotide
cccggaaguugccggcagctt

SEQ ID NO: 531 - DNA, 21 bp, Artificial Sequence
  Description of Combined DNA/RNA Molecule: Synthetic oligonucleotide
  Description of Artificial Sequence: Synthetic oligonucleotide
cggcaacuuccgggacgautt

SEQ ID NO: 532 - DNA, 21 bp, Artificial Sequence
  Description of Combined DNA/RNA Molecule: Synthetic oligonucleotide
  Description of Artificial Sequence: Synthetic oligonucleotide
aucgucccggaaguugccgtt

SEQ ID NO: 533 - DNA, 21 bp, Artificial Sequence
  Description of Combined DNA/RNA Molecule: Synthetic oligonucleotide
  Description of Artificial Sequence: Synthetic oligonucleotide
cggcaacuuccgggacgautt

SEQ ID NO: 534 - DNA, 21 bp, Artificial Sequence
  Description of Combined DNA/RNA Molecule: Synthetic oligonucleotide
  Description of Artificial Sequence: Synthetic oligonucleotide
aucgucccggaaguugccgtt

SEQ ID NO: 535 - DNA, 21 bp, Artificial Sequence
  Description of Combined DNA/RNA Molecule: Synthetic oligonucleotide
  Description of Artificial Sequence: Synthetic oligonucleotide
ggcaacuuccgggacgaugtt

SEQ ID NO: 536 - DNA, 21 bp, Artificial Sequence
  Description of Combined DNA/RNA Molecule: Synthetic oligonucleotide
  Description of Artificial Sequence: Synthetic oligonucleotide
caucgucccggaaguugcctt

SEQ ID NO: 537 - DNA, 21 bp, Artificial Sequence
  Description of Combined DNA/RNA Molecule: Synthetic oligonucleotide
  Description of Artificial Sequence: Synthetic oligonucleotide
ggcaacuuccgggacgaugtt

SEQ ID NO: 538 - DNA, 21 bp, Artificial Sequence
  Description of Combined DNA/RNA Molecule: Synthetic oligonucleotide
  Description of Artificial Sequence: Synthetic oligonucleotide
caucgucccggaaguugcctt

SEQ ID NO: 539 - DNA, 21 bp, Artificial Sequence
  Description of Combined DNA/RNA Molecule: Synthetic oligonucleotide
  Description of Artificial Sequence: Synthetic oligonucleotide
uuccgggacgaugccugcctt

SEQ ID NO: 540 - DNA, 21 bp, Artificial Sequence
  Description of Combined DNA/RNA Molecule: Synthetic oligonucleotide
  Description of Artificial Sequence: Synthetic oligonucleotide
ggcaggcaucgucccggaatt

SEQ ID NO: 541 - DNA, 21 bp, Artificial Sequence
  Description of Combined DNA/RNA Molecule: Synthetic oligonucleotide
  Description of Artificial Sequence: Synthetic oligonucleotide
uuccgggacgaugccugcctt

SEQ ID NO: 542 - DNA, 21 bp, Artificial Sequence
  Description of Combined DNA/RNA Molecule: Synthetic oligonucleotide
  Description of Artificial Sequence: Synthetic oligonucleotide
ggcaggcaucgucccggaatt

SEQ ID NO: 543 - DNA, 21 bp, Artificial Sequence
  Description of Combined DNA/RNA Molecule: Synthetic oligonucleotide
  Description of Artificial Sequence: Synthetic oligonucleotide
ggacgaugccugccucuactt

SEQ ID NO: 544 - DNA, 21 bp, Artificial Sequence
  Description of Combined DNA/RNA Molecule: Synthetic oligonucleotide
  Description of Artificial Sequence: Synthetic oligonucleotide
guagaggcaggcaucgucctt

SEQ ID NO: 545 - DNA, 21 bp, Artificial Sequence
  Description of Combined DNA/RNA Molecule: Synthetic oligonucleotide
  Description of Artificial Sequence: Synthetic oligonucleotide
ggacgaugccugccucuactt

SEQ ID NO: 546 - DNA, 21 bp, Artificial Sequence
  Description of Combined DNA/RNA Molecule: Synthetic oligonucleotide
  Description of Artificial Sequence: Synthetic oligonucleotide
guagaggcaggcaucgucctt

SEQ ID NO: 547 - DNA, 21 bp, Artificial Sequence
  Description of Combined DNA/RNA Molecule: Synthetic oligonucleotide
  Description of Artificial Sequence: Synthetic oligonucleotide
ggacgaugccugccucuactt

SEQ ID NO: 548 - DNA, 21 bp, Artificial Sequence
  Description of Combined DNA/RNA Molecule: Synthetic oligonucleotide
  Description of Artificial Sequence: Synthetic oligonucleotide
guagaggcaggcaucgucctt

SEQ ID NO: 549 - DNA, 21 bp, Artificial Sequence
  Description of Combined DNA/RNA Molecule: Synthetic oligonucleotide
  Description of Artificial Sequence: Synthetic oligonucleotide
gcucccgaggucaucacagtt

SEQ ID NO: 550 - DNA, 21 bp, Artificial Sequence
  Description of Combined DNA/RNA Molecule: Synthetic oligonucleotide
  Description of Artificial Sequence: Synthetic oligonucleotide
cugugaugaccucgggagctt

SEQ ID NO: 551 - DNA, 21 bp, Artificial Sequence
  Description of Combined DNA/RNA Molecule: Synthetic oligonucleotide
  Description of Artificial Sequence: Synthetic oligonucleotide
cucccgaggucaucacagutt

SEQ ID NO: 552 - DNA, 21 bp, Artificial Sequence
  Description of Combined DNA/RNA Molecule: Synthetic oligonucleotide
  Description of Artificial Sequence: Synthetic oligonucleotide
acugugaugaccucgggagtt

SEQ ID NO: 553 - DNA, 21 bp, Artificial Sequence
  Description of Combined DNA/RNA Molecule: Synthetic oligonucleotide
  Description of Artificial Sequence: Synthetic oligonucleotide
ucccgaggucaucacaguutt

SEQ ID NO: 554 - DNA, 21 bp, Artificial Sequence
  Description of Combined DNA/RNA Molecule: Synthetic oligonucleotide
  Description of Artificial Sequence: Synthetic oligonucleotide
aacugugaugaccucgggatt

SEQ ID NO: 555 - DNA, 21 bp, Artificial Sequence
  Description of Combined DNA/RNA Molecule: Synthetic oligonucleotide
  Description of Artificial Sequence: Synthetic oligonucleotide
ccaagaccagccggugacctt

SEQ ID NO: 556 - DNA, 21 bp, Artificial Sequence
  Description of Combined DNA/RNA Molecule: Synthetic oligonucleotide
  Description of Artificial Sequence: Synthetic oligonucleotide
ggucaccggcuggucuuggtt

SEQ ID NO: 557 - DNA, 21 bp, Artificial Sequence
  Description of Combined DNA/RNA Molecule: Synthetic oligonucleotide
  Description of Artificial Sequence: Synthetic oligonucleotide
caagaccagccggugaccctt

SEQ ID NO: 558 - DNA, 21 bp, Artificial Sequence
  Description of Combined DNA/RNA Molecule: Synthetic oligonucleotide
  Description of Artificial Sequence: Synthetic oligonucleotide
gggucaccggcuggucuugtt

SEQ ID NO: 559 - DNA, 21 bp, Artificial Sequence
  Description of Combined DNA/RNA Molecule: Synthetic oligonucleotide
  Description of Artificial Sequence: Synthetic oligonucleotide
accaacuuuggccgcugugtt

SEQ ID NO: 560 - DNA, 21 bp, Artificial Sequence
  Description of Combined DNA/RNA Molecule: Synthetic oligonucleotide
  Description of Artificial Sequence: Synthetic oligonucleotide
cacagcggccaaaguuggutt

SEQ ID NO: 561 - DNA, 21 bp, Artificial Sequence
  Description of Combined DNA/RNA Molecule: Synthetic oligonucleotide
  Description of Artificial Sequence: Synthetic oligonucleotide
accaacuuuggccgcugugtt

SEQ ID NO: 562 - DNA, 21 bp, Artificial Sequence
  Description of Combined DNA/RNA Molecule: Synthetic oligonucleotide
  Description of Artificial Sequence: Synthetic oligonucleotide
cacagcggccaaaguuggutt

SEQ ID NO: 563 - DNA, 21 bp, Artificial Sequence
  Description of Combined DNA/RNA Molecule: Synthetic oligonucleotide
  Description of Artificial Sequence: Synthetic oligonucleotide
caacuuuggccgcugugugtt

SEQ ID NO: 564 - DNA, 21 bp, Artificial Sequence
  Description of Combined DNA/RNA Molecule: Synthetic oligonucleotide
  Description of Artificial Sequence: Synthetic oligonucleotide
cacacagcggccaaaguugtt

SEQ ID NO: 565 - DNA, 21 bp, Artificial Sequence
  Description of Combined DNA/RNA Molecule: Synthetic oligonucleotide
  Description of Artificial Sequence: Synthetic oligonucleotide
caacuuuggccgcugugugtt

SEQ ID NO: 566 - DNA, 21 bp, Artificial Sequence
  Description of Combined DNA/RNA Molecule: Synthetic oligonucleotide
  Description of Artificial Sequence: Synthetic oligonucleotide
cacacagcggccaaaguugtt

SEQ ID NO: 567 - DNA, 21 bp, Artificial Sequence
  Description of Combined DNA/RNA Molecule: Synthetic oligonucleotide
  Description of Artificial Sequence: Synthetic oligonucleotide
cgcuguguggaccucuuugtt

SEQ ID NO: 568 - DNA, 21 bp, Artificial Sequence
  Description of Combined DNA/RNA Molecule: Synthetic oligonucleotide
  Description of Artificial Sequence: Synthetic oligonucleotide
caaagagguccacacagcgtt

SEQ ID NO: 569 - DNA, 21 bp, Artificial Sequence
  Description of Combined DNA/RNA Molecule: Synthetic oligonucleotide
  Description of Artificial Sequence: Synthetic oligonucleotide
cgcuguguggaccucuuugtt

SEQ ID NO: 570 - DNA, 21 bp, Artificial Sequence
  Description of Combined DNA/RNA Molecule: Synthetic oligonucleotide
  Description of Artificial Sequence: Synthetic oligonucleotide
caaagagguccacacagcgtt

SEQ ID NO: 571 - DNA, 21 bp, Artificial Sequence
  Description of Combined DNA/RNA Molecule: Synthetic oligonucleotide
  Description of Artificial Sequence: Synthetic oligonucleotide
gacaucauuggugccuccatt

SEQ ID NO: 572 - DNA, 21 bp, Artificial Sequence
  Description of Combined DNA/RNA Molecule: Synthetic oligonucleotide
  Description of Artificial Sequence: Synthetic oligonucleotide
uggaggcaccaaugauguctt

SEQ ID NO: 573 - DNA, 21 bp, Artificial Sequence
  Description of Combined DNA/RNA Molecule: Synthetic oligonucleotide
  Description of Artificial Sequence: Synthetic oligonucleotide
gacaucauuggugccuccatt

SEQ ID NO: 574 - DNA, 21 bp, Artificial Sequence
  Description of Combined DNA/RNA Molecule: Synthetic oligonucleotide
  Description of Artificial Sequence: Synthetic oligonucleotide
uggaggcaccaaugauguctt

SEQ ID NO: 575 - DNA, 21 bp, Artificial Sequence
  Description of Combined DNA/RNA Molecule: Synthetic oligonucleotide
  Description of Artificial Sequence: Synthetic oligonucleotide
ucauuggugccuccagcgatt

SEQ ID NO: 576 - DNA, 21 bp, Artificial Sequence
  Description of Combined DNA/RNA Molecule: Synthetic oligonucleotide
  Description of Artificial Sequence: Synthetic oligonucleotide
ucgcuggaggcaccaaugatt

SEQ ID NO: 577 - DNA, 21 bp, Artificial Sequence
  Description of Combined DNA/RNA Molecule: Synthetic oligonucleotide
  Description of Artificial Sequence: Synthetic oligonucleotide
ucauuggugccuccagcgatt

SEQ ID NO: 578 - DNA, 21 bp, Artificial Sequence
  Description of Combined DNA/RNA Molecule: Synthetic oligonucleotide
  Description of Artificial Sequence: Synthetic oligonucleotide
ucgcuggaggcaccaaugatt

SEQ ID NO: 579 - DNA, 21 bp, Artificial Sequence
  Description of Combined DNA/RNA Molecule: Synthetic oligonucleotide
  Description of Artificial Sequence: Synthetic oligonucleotide
agcaccugcuuugugucactt

SEQ ID NO: 580 - DNA, 21 bp, Artificial Sequence
  Description of Combined DNA/RNA Molecule: Synthetic oligonucleotide
  Description of Artificial Sequence: Synthetic oligonucleotide
gugacacaaagcaggugcutt

SEQ ID NO: 581 - DNA, 21 bp, Artificial Sequence
  Description of Combined DNA/RNA Molecule: Synthetic oligonucleotide
  Description of Artificial Sequence: Synthetic oligonucleotide
agcaccugcuuugugucactt

SEQ ID NO: 582 - DNA, 21 bp, Artificial Sequence
  Description of Combined DNA/RNA Molecule: Synthetic oligonucleotide
  Description of Artificial Sequence: Synthetic oligonucleotide
gugacacaaagcaggugcutt

SEQ ID NO: 583 - DNA, 21 bp, Artificial Sequence
  Description of Combined DNA/RNA Molecule: Synthetic oligonucleotide
  Description of Artificial Sequence: Synthetic oligonucleotide
cacagagugggacaucacatt

SEQ ID NO: 584 - DNA, 21 bp, Artificial Sequence
  Description of Combined DNA/RNA Molecule: Synthetic oligonucleotide
  Description of Artificial Sequence: Synthetic oligonucleotide
ugugaugucccacucugugtt

SEQ ID NO: 585 - DNA, 21 bp, Artificial Sequence
  Description of Combined DNA/RNA Molecule: Synthetic oligonucleotide
  Description of Artificial Sequence: Synthetic oligonucleotide
augcugucugccgagccggtt

SEQ ID NO: 586 - DNA, 21 bp, Artificial Sequence
  Description of Combined DNA/RNA Molecule: Synthetic oligonucleotide
  Description of Artificial Sequence: Synthetic oligonucleotide
ccggcucggcagacagcautt

SEQ ID NO: 587 - DNA, 21 bp, Artificial Sequence
  Description of Combined DNA/RNA Molecule: Synthetic oligonucleotide
  Description of Artificial Sequence: Synthetic oligonucleotide
augcugucugccgagccggtt

SEQ ID NO: 588 - DNA, 21 bp, Artificial Sequence
  Description of Combined DNA/RNA Molecule: Synthetic oligonucleotide
  Description of Artificial Sequence: Synthetic oligonucleotide
ccggcucggcagacagcautt

SEQ ID NO: 589 - DNA, 21 bp, Artificial Sequence
  Description of Combined DNA/RNA Molecule: Synthetic oligonucleotide
  Description of Artificial Sequence: Synthetic oligonucleotide
gucugccgagccggagcuctt

SEQ ID NO: 590 - DNA, 21 bp, Artificial Sequence
  Description of Combined DNA/RNA Molecule: Synthetic oligonucleotide
  Description of Artificial Sequence: Synthetic oligonucleotide
gagcuccggcucggcagactt

SEQ ID NO: 591 - DNA, 21 bp, Artificial Sequence
  Description of Combined DNA/RNA Molecule: Synthetic oligonucleotide
  Description of Artificial Sequence: Synthetic oligonucleotide
gucugccgagccggagcuctt

SEQ ID NO: 592 - DNA, 21 bp, Artificial Sequence
  Description of Combined DNA/RNA Molecule: Synthetic oligonucleotide
  Description of Artificial Sequence: Synthetic oligonucleotide
gagcuccggcucggcagactt

SEQ ID NO: 593 - DNA, 21 bp, Artificial Sequence
  Description of Combined DNA/RNA Molecule: Synthetic oligonucleotide
  Description of Artificial Sequence: Synthetic oligonucleotide
guugaggcagagacugauctt

SEQ ID NO: 594 - DNA, 21 bp, Artificial Sequence
  Description of Combined DNA/RNA Molecule: Synthetic oligonucleotide
  Description of Artificial Sequence: Synthetic oligonucleotide
gaucagucucugccucaactt

SEQ ID NO: 595 - DNA, 21 bp, Artificial Sequence
  Description of Combined DNA/RNA Molecule: Synthetic oligonucleotide
  Description of Artificial Sequence: Synthetic oligonucleotide
guugaggcagagacugauctt

SEQ ID NO: 596 - DNA, 21 bp, Artificial Sequence
  Description of Combined DNA/RNA Molecule: Synthetic oligonucleotide
  Description of Artificial Sequence: Synthetic oligonucleotide
gaucagucucugccucaactt

SEQ ID NO: 597 - DNA, 21 bp, Artificial Sequence
  Description of Combined DNA/RNA Molecule: Synthetic oligonucleotide
  Description of Artificial Sequence: Synthetic oligonucleotide
gcagagacugauccacuuctt

SEQ ID NO: 598 - DNA, 21 bp, Artificial Sequence
  Description of Combined DNA/RNA Molecule: Synthetic oligonucleotide
  Description of Artificial Sequence: Synthetic oligonucleotide
gaaguggaucagucucugctt

SEQ ID NO: 599 - DNA, 21 bp, Artificial Sequence
  Description of Combined DNA/RNA Molecule: Synthetic oligonucleotide
  Description of Artificial Sequence: Synthetic oligonucleotide
gcagagacugauccacuuctt

SEQ ID NO: 600 - DNA, 21 bp, Artificial Sequence
  Description of Combined DNA/RNA Molecule: Synthetic oligonucleotide
  Description of Artificial Sequence: Synthetic oligonucleotide
gaaguggaucagucucugctt

SEQ ID NO: 601 - DNA, 21 bp, Artificial Sequence
  Description of Combined DNA/RNA Molecule: Synthetic oligonucleotide
  Description of Artificial Sequence: Synthetic oligonucleotide
agagacugauccacuucuctt

SEQ ID NO: 602 - DNA, 21 bp, Artificial Sequence
  Description of Combined DNA/RNA Molecule: Synthetic oligonucleotide
  Description of Artificial Sequence: Synthetic oligonucleotide
gagaaguggaucagucucutt

SEQ ID NO: 603 - DNA, 21 bp, Artificial Sequence
  Description of Combined DNA/RNA Molecule: Synthetic oligonucleotide
  Description of Artificial Sequence: Synthetic oligonucleotide
agagacugauccacuucuctt

SEQ ID NO: 604 - DNA, 21 bp, Artificial Sequence
  Description of Combined DNA/RNA Molecule: Synthetic oligonucleotide
  Description of Artificial Sequence: Synthetic oligonucleotide
gagaaguggaucagucucutt

SEQ ID NO: 605 - DNA, 21 bp, Artificial Sequence
  Description of Combined DNA/RNA Molecule: Synthetic oligonucleotide
  Description of Artificial Sequence: Synthetic oligonucleotide
uucucugccaaagaugucatt

SEQ ID NO: 606 - DNA, 21 bp, Artificial Sequence
  Description of Combined DNA/RNA Molecule: Synthetic oligonucleotide
  Description of Artificial Sequence: Synthetic oligonucleotide
ugacaucuuuggcagagaatt

SEQ ID NO: 607 - DNA, 21 bp, Artificial Sequence
  Description of Combined DNA/RNA Molecule: Synthetic oligonucleotide
  Description of Artificial Sequence: Synthetic oligonucleotide
uucucugccaaagaugucatt

SEQ ID NO: 608 - DNA, 21 bp, Artificial Sequence
  Description of Combined DNA/RNA Molecule: Synthetic oligonucleotide
  Description of Artificial Sequence: Synthetic oligonucleotide
ugacaucuuuggcagagaatt

SEQ ID NO: 609 - DNA, 21 bp, Artificial Sequence
  Description of Combined DNA/RNA Molecule: Synthetic oligonucleotide
  Description of Artificial Sequence: Synthetic oligonucleotide
cucugccaaagaugucauctt

SEQ ID NO: 610 - DNA, 21 bp, Artificial Sequence
  Description of Combined DNA/RNA Molecule: Synthetic oligonucleotide
  Description of Artificial Sequence: Synthetic oligonucleotide
gaugacaucuuuggcagagtt

SEQ ID NO: 611 - DNA, 21 bp, Artificial Sequence
  Description of Combined DNA/RNA Molecule: Synthetic oligonucleotide
  Description of Artificial Sequence: Synthetic oligonucleotide
cucugccaaagaugucauctt

SEQ ID NO: 612 - DNA, 21 bp, Artificial Sequence
  Description of Combined DNA/RNA Molecule: Synthetic oligonucleotide
  Description of Artificial Sequence: Synthetic oligonucleotide
gaugacaucuuuggcagagtt

SEQ ID NO: 613 - DNA, 21 bp, Artificial Sequence
  Description of Combined DNA/RNA Molecule: Synthetic oligonucleotide
  Description of Artificial Sequence: Synthetic oligonucleotide
cugaggaccagcggguacutt

SEQ ID NO: 614 - DNA, 21 bp, Artificial Sequence
  Description of Combined DNA/RNA Molecule: Synthetic oligonucleotide
  Description of Artificial Sequence: Synthetic oligonucleotide
aguacccgcugguccucagtt

SEQ ID NO: 615 - DNA, 21 bp, Artificial Sequence
  Description of Combined DNA/RNA Molecule: Synthetic oligonucleotide
  Description of Artificial Sequence: Synthetic oligonucleotide
cugaggaccagcggguacutt

SEQ ID NO: 616 - DNA, 21 bp, Artificial Sequence
  Description of Combined DNA/RNA Molecule: Synthetic oligonucleotide
  Description of Artificial Sequence: Synthetic oligonucleotide
aguacccgcugguccucagtt

SEQ ID NO: 617 - DNA, 21 bp, Artificial Sequence
  Description of Combined DNA/RNA Molecule: Synthetic oligonucleotide
  Description of Artificial Sequence: Synthetic oligonucleotide
ugaggaccagcggguacugtt

SEQ ID NO: 618 - DNA, 21 bp, Artificial Sequence
  Description of Combined DNA/RNA Molecule: Synthetic oligonucleotide
  Description of Artificial Sequence: Synthetic oligonucleotide
caguacccgcugguccucatt

SEQ ID NO: 619 - DNA, 21 bp, Artificial Sequence
  Description of Combined DNA/RNA Molecule: Synthetic oligonucleotide
  Description of Artificial Sequence: Synthetic oligonucleotide
ugaggaccagcggguacugtt

SEQ ID NO: 620 - DNA, 21 bp, Artificial Sequence
  Description of Combined DNA/RNA Molecule: Synthetic oligonucleotide
  Description of Artificial Sequence: Synthetic oligonucleotide
caguacccgcugguccucatt

SEQ ID NO: 621 - DNA, 21 bp, Artificial Sequence
  Description of Combined DNA/RNA Molecule: Synthetic oligonucleotide
  Description of Artificial Sequence: Synthetic oligonucleotide
acuguauggucagcacacutt

SEQ ID NO: 622 - DNA, 21 bp, Artificial Sequence
  Description of Combined DNA/RNA Molecule: Synthetic oligonucleotide
  Description of Artificial Sequence: Synthetic oligonucleotide
agugugcugaccauacagutt

SEQ ID NO: 623 - DNA, 21 bp, Artificial Sequence
  Description of Combined DNA/RNA Molecule: Synthetic oligonucleotide
  Description of Artificial Sequence: Synthetic oligonucleotide
uguauggucagcacacucgtt

SEQ ID NO: 624 - DNA, 21 bp, Artificial Sequence
  Description of Combined DNA/RNA Molecule: Synthetic oligonucleotide
  Description of Artificial Sequence: Synthetic oligonucleotide
cgagugugcugaccauacatt

SEQ ID NO: 625 - DNA, 21 bp, Artificial Sequence
  Description of Combined DNA/RNA Molecule: Synthetic oligonucleotide
  Description of Artificial Sequence: Synthetic oligonucleotide
guauggucagcacacucggtt

SEQ ID NO: 626 - DNA, 21 bp, Artificial Sequence
  Description of Combined DNA/RNA Molecule: Synthetic oligonucleotide
  Description of Artificial Sequence: Synthetic oligonucleotide
ccgagugugcugaccauactt

SEQ ID NO: 627 - DNA, 21 bp, Artificial Sequence
  Description of Combined DNA/RNA Molecule: Synthetic oligonucleotide
  Description of Artificial Sequence: Synthetic oligonucleotide
ggauggccacagccgucgctt

SEQ ID NO: 628 - DNA, 21 bp, Artificial Sequence
  Description of Combined DNA/RNA Molecule: Synthetic oligonucleotide
  Description of Artificial Sequence: Synthetic oligonucleotide
gcgacggcuguggccaucctt

SEQ ID NO: 629 - DNA, 21 bp, Artificial Sequence
  Description of Combined DNA/RNA Molecule: Synthetic oligonucleotide
  Description of Artificial Sequence: Synthetic oligonucleotide
gauggccacagccgucgcctt

SEQ ID NO: 630 - DNA, 21 bp, Artificial Sequence
  Description of Combined DNA/RNA Molecule: Synthetic oligonucleotide
  Description of Artificial Sequence: Synthetic oligonucleotide
ggcgacggcuguggccauctt

SEQ ID NO: 631 - DNA, 21 bp, Artificial Sequence
  Description of Combined DNA/RNA Molecule: Synthetic oligonucleotide
  Description of Artificial Sequence: Synthetic oligonucleotide
caagcuggucugccgggcctt

SEQ ID NO: 632 - DNA, 21 bp, Artificial Sequence
  Description of Combined DNA/RNA Molecule: Synthetic oligonucleotide
  Description of Artificial Sequence: Synthetic oligonucleotide
ggcccggcagaccagcuugtt

SEQ ID NO: 633 - DNA, 21 bp, Artificial Sequence
  Description of Combined DNA/RNA Molecule: Synthetic oligonucleotide
  Description of Artificial Sequence: Synthetic oligonucleotide
cugccgggcccacaacgcutt

SEQ ID NO: 634 - DNA, 21 bp, Artificial Sequence
  Description of Combined DNA/RNA Molecule: Synthetic oligonucleotide
  Description of Artificial Sequence: Synthetic oligonucleotide
agcguugugggcccggcagtt

SEQ ID NO: 635 - DNA, 21 bp, Artificial Sequence
  Description of Combined DNA/RNA Molecule: Synthetic oligonucleotide
  Description of Artificial Sequence: Synthetic oligonucleotide
cugccgggcccacaacgcutt

SEQ ID NO: 636 - DNA, 21 bp, Artificial Sequence
  Description of Combined DNA/RNA Molecule: Synthetic oligonucleotide
  Description of Artificial Sequence: Synthetic oligonucleotide
agcguugugggcccggcagtt

SEQ ID NO: 637 - DNA, 21 bp, Artificial Sequence
  Description of Combined DNA/RNA Molecule: Synthetic oligonucleotide
  Description of Artificial Sequence: Synthetic oligonucleotide
ugccgggcccacaacgcuutt

SEQ ID NO: 638 - DNA, 21 bp, Artificial Sequence
  Description of Combined DNA/RNA Molecule: Synthetic oligonucleotide
  Description of Artificial Sequence: Synthetic oligonucleotide
aagcguugugggcccggcatt

SEQ ID NO: 639 - DNA, 21 bp, Artificial Sequence
  Description of Combined DNA/RNA Molecule: Synthetic oligonucleotide
  Description of Artificial Sequence: Synthetic oligonucleotide
ugccgggcccacaacgcuutt

SEQ ID NO: 640 - DNA, 21 bp, Artificial Sequence
  Description of Combined DNA/RNA Molecule: Synthetic oligonucleotide
  Description of Artificial Sequence: Synthetic oligonucleotide
aagcguugugggcccggcatt

SEQ ID NO: 641 - DNA, 21 bp, Artificial Sequence
  Description of Combined DNA/RNA Molecule: Synthetic oligonucleotide
  Description of Artificial Sequence: Synthetic oligonucleotide
ccgggcccacaacgcuuuutt

SEQ ID NO: 642 - DNA, 21 bp, Artificial Sequence
  Description of Combined DNA/RNA Molecule: Synthetic oligonucleotide
  Description of Artificial Sequence: Synthetic oligonucleotide
aaaagcguugugggcccggtt

SEQ ID NO: 643 - DNA, 21 bp, Artificial Sequence
  Description of Combined DNA/RNA Molecule: Synthetic oligonucleotide
  Description of Artificial Sequence: Synthetic oligonucleotide
ccgggcccacaacgcuuuutt

SEQ ID NO: 644 - DNA, 21 bp, Artificial Sequence
  Description of Combined DNA/RNA Molecule: Synthetic oligonucleotide
  Description of Artificial Sequence: Synthetic oligonucleotide
aaaagcguugugggcccggtt

SEQ ID NO: 645 - DNA, 21 bp, Artificial Sequence
  Description of Combined DNA/RNA Molecule: Synthetic oligonucleotide
  Description of Artificial Sequence: Synthetic oligonucleotide
gggcccacaacgcuuuuggtt

SEQ ID NO: 646 - DNA, 21 bp, Artificial Sequence
  Description of Combined DNA/RNA Molecule: Synthetic oligonucleotide
  Description of Artificial Sequence: Synthetic oligonucleotide
ccaaaagcguugugggccctt

SEQ ID NO: 647 - DNA, 21 bp, Artificial Sequence
  Description of Combined DNA/RNA Molecule: Synthetic oligonucleotide
  Description of Artificial Sequence: Synthetic oligonucleotide
gggcccacaacgcuuuuggtt

SEQ ID NO: 648 - DNA, 21 bp, Artificial Sequence
  Description of Combined DNA/RNA Molecule: Synthetic oligonucleotide
  Description of Artificial Sequence: Synthetic oligonucleotide
ccaaaagcguugugggccctt

SEQ ID NO: 649 - DNA, 21 bp, Artificial Sequence
  Description of Combined DNA/RNA Molecule: Synthetic oligonucleotide
  Description of Artificial Sequence: Synthetic oligonucleotide
ggugagggugucuacgccatt

SEQ ID NO: 650 - DNA, 21 bp, Artificial Sequence
  Description of Combined DNA/RNA Molecule: Synthetic oligonucleotide
  Description of Artificial Sequence: Synthetic oligonucleotide
uggcguagacacccucacctt

SEQ ID NO: 651 - DNA, 21 bp, Artificial Sequence
  Description of Combined DNA/RNA Molecule: Synthetic oligonucleotide
  Description of Artificial Sequence: Synthetic oligonucleotide
ggugagggugucuacgccatt

SEQ ID NO: 652 - DNA, 21 bp, Artificial Sequence
  Description of Combined DNA/RNA Molecule: Synthetic oligonucleotide
  Description of Artificial Sequence: Synthetic oligonucleotide
uggcguagacacccucacctt

SEQ ID NO: 653 - DNA, 21 bp, Artificial Sequence
  Description of Combined DNA/RNA Molecule: Synthetic oligonucleotide
  Description of Artificial Sequence: Synthetic oligonucleotide
gagggugucuacgccauugtt

SEQ ID NO: 654 - DNA, 21 bp, Artificial Sequence
  Description of Combined DNA/RNA Molecule: Synthetic oligonucleotide
  Description of Artificial Sequence: Synthetic oligonucleotide
caauggcguagacacccuctt

SEQ ID NO: 655 - DNA, 21 bp, Artificial Sequence
  Description of Combined DNA/RNA Molecule: Synthetic oligonucleotide
  Description of Artificial Sequence: Synthetic oligonucleotide
gagggugucuacgccauugtt

SEQ ID NO: 656 - DNA, 21 bp, Artificial Sequence
  Description of Combined DNA/RNA Molecule: Synthetic oligonucleotide
  Description of Artificial Sequence: Synthetic oligonucleotide
caauggcguagacacccuctt

SEQ ID NO: 657 - DNA, 21 bp, Artificial Sequence
  Description of Combined DNA/RNA Molecule: Synthetic oligonucleotide
  Description of Artificial Sequence: Synthetic oligonucleotide
gccaggugcugccugcuactt

SEQ ID NO: 658 - DNA, 21 bp, Artificial Sequence
  Description of Combined DNA/RNA Molecule: Synthetic oligonucleotide
  Description of Artificial Sequence: Synthetic oligonucleotide
guagcaggcagcaccuggctt

SEQ ID NO: 659 - DNA, 21 bp, Artificial Sequence
  Description of Combined DNA/RNA Molecule: Synthetic oligonucleotide
  Description of Artificial Sequence: Synthetic oligonucleotide
gccaggugcugccugcuactt

SEQ ID NO: 660 - DNA, 21 bp, Artificial Sequence
  Description of Combined DNA/RNA Molecule: Synthetic oligonucleotide
  Description of Artificial Sequence: Synthetic oligonucleotide
guagcaggcagcaccuggctt

SEQ ID NO: 661 - DNA, 21 bp, Artificial Sequence
  Description of Combined DNA/RNA Molecule: Synthetic oligonucleotide
  Description of Artificial Sequence: Synthetic oligonucleotide
ccaggugcugccugcuacctt

SEQ ID NO: 662 - DNA, 21 bp, Artificial Sequence
  Description of Combined DNA/RNA Molecule: Synthetic oligonucleotide
  Description of Artificial Sequence: Synthetic oligonucleotide
gguagcaggcagcaccuggtt

SEQ ID NO: 663 - DNA, 21 bp, Artificial Sequence
  Description of Combined DNA/RNA Molecule: Synthetic oligonucleotide
  Description of Artificial Sequence: Synthetic oligonucleotide
ccaggugcugccugcuacctt

SEQ ID NO: 664 - DNA, 21 bp, Artificial Sequence
  Description of Combined DNA/RNA Molecule: Synthetic oligonucleotide
  Description of Artificial Sequence: Synthetic oligonucleotide
gguagcaggcagcaccuggtt

SEQ ID NO: 665 - DNA, 21 bp, Artificial Sequence
  Description of Combined DNA/RNA Molecule: Synthetic oligonucleotide
  Description of Artificial Sequence: Synthetic oligonucleotide
acccacaagccgccugugctt

SEQ ID NO: 666 - DNA, 21 bp, Artificial Sequence
  Description of Combined DNA/RNA Molecule: Synthetic oligonucleotide
  Description of Artificial Sequence: Synthetic oligonucleotide
gcacaggcggcuugugggutt

SEQ ID NO: 667 - DNA, 21 bp, Artificial Sequence
  Description of Combined DNA/RNA Molecule: Synthetic oligonucleotide
  Description of Artificial Sequence: Synthetic oligonucleotide
gugcugaggccacgagguctt

SEQ ID NO: 668 - DNA, 21 bp, Artificial Sequence
  Description of Combined DNA/RNA Molecule: Synthetic oligonucleotide
  Description of Artificial Sequence: Synthetic oligonucleotide
gaccucguggccucagcactt

SEQ ID NO: 669 - DNA, 21 bp, Artificial Sequence
  Description of Combined DNA/RNA Molecule: Synthetic oligonucleotide
  Description of Artificial Sequence: Synthetic oligonucleotide
gugcugaggccacgagguctt

SEQ ID NO: 670 - DNA, 21 bp, Artificial Sequence
  Description of Combined DNA/RNA Molecule: Synthetic oligonucleotide
  Description of Artificial Sequence: Synthetic oligonucleotide
gaccucguggccucagcactt

SEQ ID NO: 671 - DNA, 21 bp, Artificial Sequence
  Description of Combined DNA/RNA Molecule: Synthetic oligonucleotide
  Description of Artificial Sequence: Synthetic oligonucleotide
ugcugaggccacgaggucatt

SEQ ID NO: 672 - DNA, 21 bp, Artificial Sequence
  Description of Combined DNA/RNA Molecule: Synthetic oligonucleotide
  Description of Artificial Sequence: Synthetic oligonucleotide
ugaccucguggccucagcatt

SEQ ID NO: 673 - DNA, 21 bp, Artificial Sequence
  Description of Combined DNA/RNA Molecule: Synthetic oligonucleotide
  Description of Artificial Sequence: Synthetic oligonucleotide
ugcugaggccacgaggucatt

SEQ ID NO: 674 - DNA, 21 bp, Artificial Sequence
  Description of Combined DNA/RNA Molecule: Synthetic oligonucleotide
  Description of Artificial Sequence: Synthetic oligonucleotide
ugaccucguggccucagcatt

SEQ ID NO: 675 - DNA, 21 bp, Artificial Sequence
  Description of Combined DNA/RNA Molecule: Synthetic oligonucleotide
  Description of Artificial Sequence: Synthetic oligonucleotide
ugcugaggccacgaggucatt

SEQ ID NO: 676 - DNA, 21 bp, Artificial Sequence
  Description of Combined DNA/RNA Molecule: Synthetic oligonucleotide
  Description of Artificial Sequence: Synthetic oligonucleotide
ugaccucguggccucagcatt

SEQ ID NO: 677 - DNA, 21 bp, Artificial Sequence
  Description of Combined DNA/RNA Molecule: Synthetic oligonucleotide
  Description of Artificial Sequence: Synthetic oligonucleotide
ugcugaggccacgaggucatt

SEQ ID NO: 678 - DNA, 21 bp, Artificial Sequence
  Description of Combined DNA/RNA Molecule: Synthetic oligonucleotide
  Description of Artificial Sequence: Synthetic oligonucleotide
ugaccucguggccucagcatt

SEQ ID NO: 679 - DNA, 21 bp, Artificial Sequence
  Description of Combined DNA/RNA Molecule: Synthetic oligonucleotide
  Description of Artificial Sequence: Synthetic oligonucleotide
ugcugaggccacgaggucatt

SEQ ID NO: 680 - DNA, 21 bp, Artificial Sequence
  Description of Combined DNA/RNA Molecule: Synthetic oligonucleotide
  Description of Artificial Sequence: Synthetic oligonucleotide
ugaccucguggccucagcatt

SEQ ID NO: 681 - DNA, 21 bp, Artificial Sequence
  Description of Combined DNA/RNA Molecule: Synthetic oligonucleotide
  Description of Artificial Sequence: Synthetic oligonucleotide
ugcugaggccacgaggucatt

SEQ ID NO: 682 - DNA, 21 bp, Artificial Sequence
  Description of Combined DNA/RNA Molecule: Synthetic oligonucleotide
  Description of Artificial Sequence: Synthetic oligonucleotide
ugaccucguggccucagcatt

SEQ ID NO: 683 - DNA, 21 bp, Artificial Sequence
  Description of Combined DNA/RNA Molecule: Synthetic oligonucleotide
  Description of Artificial Sequence: Synthetic oligonucleotide
ugcugaggccacgaggucatt

SEQ ID NO: 684 - DNA, 21 bp, Artificial Sequence
  Description of Combined DNA/RNA Molecule: Synthetic oligonucleotide
  Description of Artificial Sequence: Synthetic oligonucleotide
ugaccucguggccucagcatt

SEQ ID NO: 685 - DNA, 21 bp, Artificial Sequence
  Description of Combined DNA/RNA Molecule: Synthetic oligonucleotide
  Description of Artificial Sequence: Synthetic oligonucleotide
ugcugaggccacgaggucatt

SEQ ID NO: 686 - DNA, 21 bp, Artificial Sequence
  Description of Combined DNA/RNA Molecule: Synthetic oligonucleotide
  Description of Artificial Sequence: Synthetic oligonucleotide
ugaccucguggccucagcatt

SEQ ID NO: 687 - DNA, 21 bp, Artificial Sequence
  Description of Combined DNA/RNA Molecule: Synthetic oligonucleotide
  Description of Artificial Sequence: Synthetic oligonucleotide
ugcugaggccacgaggucatt

SEQ ID NO: 688 - DNA, 21 bp, Artificial Sequence
  Description of Combined DNA/RNA Molecule: Synthetic oligonucleotide
  Description of Artificial Sequence: Synthetic oligonucleotide
ugaccucguggccucagcatt

SEQ ID NO: 689 - DNA, 21 bp, Artificial Sequence
  Description of Combined DNA/RNA Molecule: Synthetic oligonucleotide
  Description of Artificial Sequence: Synthetic oligonucleotide
ugcugaggccacgaggucatt

SEQ ID NO: 690 - DNA, 21 bp, Artificial Sequence
  Description of Combined DNA/RNA Molecule: Synthetic oligonucleotide
  Description of Artificial Sequence: Synthetic oligonucleotide
ugaccucguggccucagcatt

SEQ ID NO: 691 - DNA, 21 bp, Artificial Sequence
  Description of Combined DNA/RNA Molecule: Synthetic oligonucleotide
  Description of Artificial Sequence: Synthetic oligonucleotide
guggucagcggccgggaugtt

SEQ ID NO: 692 - DNA, 21 bp, Artificial Sequence
  Description of Combined DNA/RNA Molecule: Synthetic oligonucleotide
  Description of Artificial Sequence: Synthetic oligonucleotide
caucccggccgcugaccactt

SEQ ID NO: 693 - DNA, 21 bp, Artificial Sequence
  Description of Combined DNA/RNA Molecule: Synthetic oligonucleotide
  Description of Artificial Sequence: Synthetic oligonucleotide
guggucagcggccgggaugtt

SEQ ID NO: 694 - DNA, 21 bp, Artificial Sequence
  Description of Combined DNA/RNA Molecule: Synthetic oligonucleotide
  Description of Artificial Sequence: Synthetic oligonucleotide
caucccggccgcugaccactt

SEQ ID NO: 695 - DNA, 21 bp, Artificial Sequence
  Description of Combined DNA/RNA Molecule: Synthetic oligonucleotide
  Description of Artificial Sequence: Synthetic oligonucleotide
guggucagcggccgggaugtt

SEQ ID NO: 696 - DNA, 21 bp, Artificial Sequence
  Description of Combined DNA/RNA Molecule: Synthetic oligonucleotide
  Description of Artificial Sequence: Synthetic oligonucleotide
caucccggccgcugaccactt

SEQ ID NO: 697 - DNA, 21 bp, Artificial Sequence
  Description of Combined DNA/RNA Molecule: Synthetic oligonucleotide
  Description of Artificial Sequence: Synthetic oligonucleotide
guggucagcggccgggaugtt

SEQ ID NO: 698 - DNA, 21 bp, Artificial Sequence
  Description of Combined DNA/RNA Molecule: Synthetic oligonucleotide
  Description of Artificial Sequence: Synthetic oligonucleotide
caucccggccgcugaccactt

SEQ ID NO: 699 - DNA, 21 bp, Artificial Sequence
  Description of Combined DNA/RNA Molecule: Synthetic oligonucleotide
  Description of Artificial Sequence: Synthetic oligonucleotide
guggucagcggccgggaugtt

SEQ ID NO: 700 - DNA, 21 bp, Artificial Sequence
  Description of Combined DNA/RNA Molecule: Synthetic oligonucleotide
  Description of Artificial Sequence: Synthetic oligonucleotide
caucccggccgcugaccactt

SEQ ID NO: 701 - DNA, 21 bp, Artificial Sequence
  Description of Combined DNA/RNA Molecule: Synthetic oligonucleotide
  Description of Artificial Sequence: Synthetic oligonucleotide
guggucagcggccgggaugtt

SEQ ID NO: 702 - DNA, 21 bp, Artificial Sequence
  Description of Combined DNA/RNA Molecule: Synthetic oligonucleotide
  Description of Artificial Sequence: Synthetic oligonucleotide
caucccggccgcugaccactt

SEQ ID NO: 703 - DNA, 21 bp, Artificial Sequence
  Description of Combined DNA/RNA Molecule: Synthetic oligonucleotide
  Description of Artificial Sequence: Synthetic oligonucleotide
guggucagcggccgggaugtt

SEQ ID NO: 704 - DNA, 21 bp, Artificial Sequence
  Description of Combined DNA/RNA Molecule: Synthetic oligonucleotide
  Description of Artificial Sequence: Synthetic oligonucleotide
caucccggccgcugaccactt

SEQ ID NO: 705 - DNA, 21 bp, Artificial Sequence
  Description of Combined DNA/RNA Molecule: Synthetic oligonucleotide
  Description of Artificial Sequence: Synthetic oligonucleotide
ggccacgaggucagcccaatt

SEQ ID NO: 706 - DNA, 21 bp, Artificial Sequence
  Description of Combined DNA/RNA Molecule: Synthetic oligonucleotide
  Description of Artificial Sequence: Synthetic oligonucleotide
uugggcugaccucguggcctt

SEQ ID NO: 707 - DNA, 21 bp, Artificial Sequence
  Description of Combined DNA/RNA Molecule: Synthetic oligonucleotide
  Description of Artificial Sequence: Synthetic oligonucleotide
cgaggucagcccaaccagutt

SEQ ID NO: 708 - DNA, 21 bp, Artificial Sequence
  Description of Combined DNA/RNA Molecule: Synthetic oligonucleotide
  Description of Artificial Sequence: Synthetic oligonucleotide
acugguugggcugaccucgtt

SEQ ID NO: 709 - DNA, 21 bp, Artificial Sequence
  Description of Combined DNA/RNA Molecule: Synthetic oligonucleotide
  Description of Artificial Sequence: Synthetic oligonucleotide
gucagcccaaccagugcgutt

SEQ ID NO: 710 - DNA, 21 bp, Artificial Sequence
  Description of Combined DNA/RNA Molecule: Synthetic oligonucleotide
  Description of Artificial Sequence: Synthetic oligonucleotide
acgcacugguugggcugactt

SEQ ID NO: 711 - DNA, 21 bp, Artificial Sequence
  Description of Combined DNA/RNA Molecule: Synthetic oligonucleotide
  Description of Artificial Sequence: Synthetic oligonucleotide
cagcccaaccagugcguggtt

SEQ ID NO: 712 - DNA, 21 bp, Artificial Sequence
  Description of Combined DNA/RNA Molecule: Synthetic oligonucleotide
  Description of Artificial Sequence: Synthetic oligonucleotide
ccacgcacugguugggcugtt

SEQ ID NO: 713 - DNA, 21 bp, Artificial Sequence
  Description of Combined DNA/RNA Molecule: Synthetic oligonucleotide
  Description of Artificial Sequence: Synthetic oligonucleotide
cacagggaggccagcaucctt

SEQ ID NO: 714 - DNA, 21 bp, Artificial Sequence
  Description of Combined DNA/RNA Molecule: Synthetic oligonucleotide
  Description of Artificial Sequence: Synthetic oligonucleotide
ggaugcuggccucccugugtt

SEQ ID NO: 715 - DNA, 21 bp, Artificial Sequence
  Description of Combined DNA/RNA Molecule: Synthetic oligonucleotide
  Description of Artificial Sequence: Synthetic oligonucleotide
ccagcauccacgcuuccugtt

SEQ ID NO: 716 - DNA, 21 bp, Artificial Sequence
  Description of Combined DNA/RNA Molecule: Synthetic oligonucleotide
  Description of Artificial Sequence: Synthetic oligonucleotide
caggaagcguggaugcuggtt

SEQ ID NO: 717 - DNA, 21 bp, Artificial Sequence
  Description of Combined DNA/RNA Molecule: Synthetic oligonucleotide
  Description of Artificial Sequence: Synthetic oligonucleotide
ccagcauccacgcuuccugtt

SEQ ID NO: 718 - DNA, 21 bp, Artificial Sequence
  Description of Combined DNA/RNA Molecule: Synthetic oligonucleotide
  Description of Artificial Sequence: Synthetic oligonucleotide
caggaagcguggaugcuggtt

SEQ ID NO: 719 - DNA, 21 bp, Artificial Sequence
  Description of Combined DNA/RNA Molecule: Synthetic oligonucleotide
  Description of Artificial Sequence: Synthetic oligonucleotide
agucaaggagcauggaauctt

SEQ ID NO: 720 - DNA, 21 bp, Artificial Sequence
  Description of Combined DNA/RNA Molecule: Synthetic oligonucleotide
  Description of Artificial Sequence: Synthetic oligonucleotide
gauuccaugcuccuugacutt

SEQ ID NO: 721 - DNA, 21 bp, Artificial Sequence
  Description of Combined DNA/RNA Molecule: Synthetic oligonucleotide
  Description of Artificial Sequence: Synthetic oligonucleotide
agucaaggagcauggaauctt

SEQ ID NO: 722 - DNA, 21 bp, Artificial Sequence
  Description of Combined DNA/RNA Molecule: Synthetic oligonucleotide
  Description of Artificial Sequence: Synthetic oligonucleotide
gauuccaugcuccuugacutt

SEQ ID NO: 723 - DNA, 21 bp, Artificial Sequence
  Description of Combined DNA/RNA Molecule: Synthetic oligonucleotide
  Description of Artificial Sequence: Synthetic oligonucleotide
agucaaggagcauggaauctt

SEQ ID NO: 724 - DNA, 21 bp, Artificial Sequence
  Description of Combined DNA/RNA Molecule: Synthetic oligonucleotide
  Description of Artificial Sequence: Synthetic oligonucleotide
gauuccaugcuccuugacutt

SEQ ID NO: 725 - DNA, 21 bp, Artificial Sequence
  Description of Combined DNA/RNA Molecule: Synthetic oligonucleotide
  Description of Artificial Sequence: Synthetic oligonucleotide
agucaaggagcauggaauctt

SEQ ID NO: 726 - DNA, 21 bp, Artificial Sequence
  Description of Combined DNA/RNA Molecule: Synthetic oligonucleotide
  Description of Artificial Sequence: Synthetic oligonucleotide
gauuccaugcuccuugacutt

SEQ ID NO: 727 - DNA, 21 bp, Artificial Sequence
  Description of Combined DNA/RNA Molecule: Synthetic oligonucleotide
  Description of Artificial Sequence: Synthetic oligonucleotide
agucaaggagcauggaauctt

SEQ ID NO: 728 - DNA, 21 bp, Artificial Sequence
  Description of Combined DNA/RNA Molecule: Synthetic oligonucleotide
  Description of Artificial Sequence: Synthetic oligonucleotide
gauuccaugcuccuugacutt

SEQ ID NO: 729 - DNA, 21 bp, Artificial Sequence
  Description of Combined DNA/RNA Molecule: Synthetic oligonucleotide
  Description of Artificial Sequence: Synthetic oligonucleotide
agucaaggagcauggaauctt

SEQ ID NO: 730 - DNA, 21 bp, Artificial Sequence
  Description of Combined DNA/RNA Molecule: Synthetic oligonucleotide
  Description of Artificial Sequence: Synthetic oligonucleotide
gauuccaugcuccuugacutt

SEQ ID NO: 731 - DNA, 21 bp, Artificial Sequence
  Description of Combined DNA/RNA Molecule: Synthetic oligonucleotide
  Description of Artificial Sequence: Synthetic oligonucleotide
agucaaggagcauggaauctt

SEQ ID NO: 732 - DNA, 21 bp, Artificial Sequence
  Description of Combined DNA/RNA Molecule: Synthetic oligonucleotide
  Description of Artificial Sequence: Synthetic oligonucleotide
gauuccaugcuccuugacutt

SEQ ID NO: 733 - DNA, 21 bp, Artificial Sequence
  Description of Combined DNA/RNA Molecule: Synthetic oligonucleotide
  Description of Artificial Sequence: Synthetic oligonucleotide
agucaaggagcauggaauctt

SEQ ID NO: 734 - DNA, 21 bp, Artificial Sequence
  Description of Combined DNA/RNA Molecule: Synthetic oligonucleotide
  Description of Artificial Sequence: Synthetic oligonucleotide
gauuccaugcuccuugacutt

SEQ ID NO: 735 - DNA, 21 bp, Artificial Sequence
  Description of Combined DNA/RNA Molecule: Synthetic oligonucleotide
  Description of Artificial Sequence: Synthetic oligonucleotide
agucaaggagcauggaauctt

SEQ ID NO: 736 - DNA, 21 bp, Artificial Sequence
  Description of Combined DNA/RNA Molecule: Synthetic oligonucleotide
  Description of Artificial Sequence: Synthetic oligonucleotide
gauuccaugcuccuugacutt

SEQ ID NO: 737 - DNA, 21 bp, Artificial Sequence
  Description of Combined DNA/RNA Molecule: Synthetic oligonucleotide
  Description of Artificial Sequence: Synthetic oligonucleotide
gcggcacccucauaggccutt

SEQ ID NO: 738 - DNA, 21 bp, Artificial Sequence
  Description of Combined DNA/RNA Molecule: Synthetic oligonucleotide
  Description of Artificial Sequence: Synthetic oligonucleotide
aggccuaugagggugccgctt

SEQ ID NO: 739 - DNA, 21 bp, Artificial Sequence
  Description of Combined DNA/RNA Molecule: Synthetic oligonucleotide
  Description of Artificial Sequence: Synthetic oligonucleotide
gcggcacccucauaggccutt

SEQ ID NO: 740 - DNA, 21 bp, Artificial Sequence
  Description of Combined DNA/RNA Molecule: Synthetic oligonucleotide
  Description of Artificial Sequence: Synthetic oligonucleotide
aggccuaugagggugccgctt

SEQ ID NO: 741 - DNA, 21 bp, Artificial Sequence
  Description of Combined DNA/RNA Molecule: Synthetic oligonucleotide
  Description of Artificial Sequence: Synthetic oligonucleotide
gcggcacccucauaggccutt

SEQ ID NO: 742 - DNA, 21 bp, Artificial Sequence
  Description of Combined DNA/RNA Molecule: Synthetic oligonucleotide
  Description of Artificial Sequence: Synthetic oligonucleotide
aggccuaugagggugccgctt

SEQ ID NO: 743 - DNA, 21 bp, Artificial Sequence
  Description of Combined DNA/RNA Molecule: Synthetic oligonucleotide
  Description of Artificial Sequence: Synthetic oligonucleotide
gcggcacccucauaggccutt

SEQ ID NO: 744 - DNA, 21 bp, Artificial Sequence
  Description of Combined DNA/RNA Molecule: Synthetic oligonucleotide
  Description of Artificial Sequence: Synthetic oligonucleotide
aggccuaugagggugccgctt

SEQ ID NO: 745 - DNA, 21 bp, Artificial Sequence
  Description of Combined DNA/RNA Molecule: Synthetic oligonucleotide
  Description of Artificial Sequence: Synthetic oligonucleotide
gcggcacccucauaggccutt

SEQ ID NO: 746 - DNA, 21 bp, Artificial Sequence
  Description of Combined DNA/RNA Molecule: Synthetic oligonucleotide
  Description of Artificial Sequence: Synthetic oligonucleotide
aggccuaugagggugccgctt

SEQ ID NO: 747 - DNA, 21 bp, Artificial Sequence
  Description of Combined DNA/RNA Molecule: Synthetic oligonucleotide
  Description of Artificial Sequence: Synthetic oligonucleotide
gcggcacccucauaggccutt

SEQ ID NO: 748 - DNA, 21 bp, Artificial Sequence
  Description of Combined DNA/RNA Molecule: Synthetic oligonucleotide
  Description of Artificial Sequence: Synthetic oligonucleotide
aggccuaugagggugccgctt

SEQ ID NO: 749 - DNA, 21 bp, Artificial Sequence
  Description of Combined DNA/RNA Molecule: Synthetic oligonucleotide
  Description of Artificial Sequence: Synthetic oligonucleotide
gcggcacccucauaggccutt

SEQ ID NO: 750 - DNA, 21 bp, Artificial Sequence
  Description of Combined DNA/RNA Molecule: Synthetic oligonucleotide
  Description of Artificial Sequence: Synthetic oligonucleotide
aggccuaugagggugccgctt

SEQ ID NO: 751 - DNA, 21 bp, Artificial Sequence
  Description of Combined DNA/RNA Molecule: Synthetic oligonucleotide
  Description of Artificial Sequence: Synthetic oligonucleotide
aaggagcauggaaucccggtt

SEQ ID NO: 752 - DNA, 21 bp, Artificial Sequence
  Description of Combined DNA/RNA Molecule: Synthetic oligonucleotide
  Description of Artificial Sequence: Synthetic oligonucleotide
ccgggauuccaugcuccuutt

SEQ ID NO: 753 - DNA, 21 bp, Artificial Sequence
  Description of Combined DNA/RNA Molecule: Synthetic oligonucleotide
  Description of Artificial Sequence: Synthetic oligonucleotide
aaggagcauggaaucccggtt

SEQ ID NO: 754 - DNA, 21 bp, Artificial Sequence
  Description of Combined DNA/RNA Molecule: Synthetic oligonucleotide
  Description of Artificial Sequence: Synthetic oligonucleotide
ccgggauuccaugcuccuutt

SEQ ID NO: 755 - DNA, 21 bp, Artificial Sequence
  Description of Combined DNA/RNA Molecule: Synthetic oligonucleotide
  Description of Artificial Sequence: Synthetic oligonucleotide
aggagcauggaaucccggctt

SEQ ID NO: 756 - DNA, 21 bp, Artificial Sequence
  Description of Combined DNA/RNA Molecule: Synthetic oligonucleotide
  Description of Artificial Sequence: Synthetic oligonucleotide
gccgggauuccaugcuccutt

SEQ ID NO: 757 - DNA, 21 bp, Artificial Sequence
  Description of Combined DNA/RNA Molecule: Synthetic oligonucleotide
  Description of Artificial Sequence: Synthetic oligonucleotide
aggagcauggaaucccggctt

SEQ ID NO: 758 - DNA, 21 bp, Artificial Sequence
  Description of Combined DNA/RNA Molecule: Synthetic oligonucleotide
  Description of Artificial Sequence: Synthetic oligonucleotide
gccgggauuccaugcuccutt

SEQ ID NO: 759 - DNA, 21 bp, Artificial Sequence
  Description of Combined DNA/RNA Molecule: Synthetic oligonucleotide
  Description of Artificial Sequence: Synthetic oligonucleotide
gagcauggaaucccggccctt

SEQ ID NO: 760 - DNA, 21 bp, Artificial Sequence
  Description of Combined DNA/RNA Molecule: Synthetic oligonucleotide
  Description of Artificial Sequence: Synthetic oligonucleotide
gggccgggauuccaugcuctt

SEQ ID NO: 761 - DNA, 21 bp, Artificial Sequence
  Description of Combined DNA/RNA Molecule: Synthetic oligonucleotide
  Description of Artificial Sequence: Synthetic oligonucleotide
gagcauggaaucccggccctt

SEQ ID NO: 762 - DNA, 21 bp, Artificial Sequence
  Description of Combined DNA/RNA Molecule: Synthetic oligonucleotide
  Description of Artificial Sequence: Synthetic oligonucleotide
gggccgggauuccaugcuctt

SEQ ID NO: 763 - DNA, 21 bp, Artificial Sequence
  Description of Combined DNA/RNA Molecule: Synthetic oligonucleotide
  Description of Artificial Sequence: Synthetic oligonucleotide
gccuacgccguagacaacatt

SEQ ID NO: 764 - DNA, 21 bp, Artificial Sequence
  Description of Combined DNA/RNA Molecule: Synthetic oligonucleotide
  Description of Artificial Sequence: Synthetic oligonucleotide
uguugucuacggcguaggctt

SEQ ID NO: 765 - DNA, 21 bp, Artificial Sequence
  Description of Combined DNA/RNA Molecule: Synthetic oligonucleotide
  Description of Artificial Sequence: Synthetic oligonucleotide
ccuacgccguagacaacactt

SEQ ID NO: 766 - DNA, 21 bp, Artificial Sequence
  Description of Combined DNA/RNA Molecule: Synthetic oligonucleotide
  Description of Artificial Sequence: Synthetic oligonucleotide
guguugucuacggcguaggtt

SEQ ID NO: 767 - DNA, 21 bp, Artificial Sequence
  Description of Combined DNA/RNA Molecule: Synthetic oligonucleotide
  Description of Artificial Sequence: Synthetic oligonucleotide
cuacgccguagacaacacgtt

SEQ ID NO: 768 - DNA, 21 bp, Artificial Sequence
  Description of Combined DNA/RNA Molecule: Synthetic oligonucleotide
  Description of Artificial Sequence: Synthetic oligonucleotide
cguguugucuacggcguagtt

SEQ ID NO: 769 - DNA, 21 bp, Artificial Sequence
  Description of Combined DNA/RNA Molecule: Synthetic oligonucleotide
  Description of Artificial Sequence: Synthetic oligonucleotide
uacgccguagacaacacgutt

SEQ ID NO: 770 - DNA, 21 bp, Artificial Sequence
  Description of Combined DNA/RNA Molecule: Synthetic oligonucleotide
  Description of Artificial Sequence: Synthetic oligonucleotide
acguguugucuacggcguatt

SEQ ID NO: 771 - DNA, 21 bp, Artificial Sequence
  Description of Combined DNA/RNA Molecule: Synthetic oligonucleotide
  Description of Artificial Sequence: Synthetic oligonucleotide
cgccguagacaacacgugutt

SEQ ID NO: 772 - DNA, 21 bp, Artificial Sequence
  Description of Combined DNA/RNA Molecule: Synthetic oligonucleotide
  Description of Artificial Sequence: Synthetic oligonucleotide
acacguguugucuacggcgtt

SEQ ID NO: 773 - DNA, 21 bp, Artificial Sequence
  Description of Combined DNA/RNA Molecule: Synthetic oligonucleotide
  Description of Artificial Sequence: Synthetic oligonucleotide
gccguagacaacacgugugtt

SEQ ID NO: 774 - DNA, 21 bp, Artificial Sequence
  Description of Combined DNA/RNA Molecule: Synthetic oligonucleotide
  Description of Artificial Sequence: Synthetic oligonucleotide
cacacguguugucuacggctt

SEQ ID NO: 775 - DNA, 21 bp, Artificial Sequence
  Description of Combined DNA/RNA Molecule: Synthetic oligonucleotide
  Description of Artificial Sequence: Synthetic oligonucleotide
ccguagacaacacgugugutt

SEQ ID NO: 776 - DNA, 21 bp, Artificial Sequence
  Description of Combined DNA/RNA Molecule: Synthetic oligonucleotide
  Description of Artificial Sequence: Synthetic oligonucleotide
acacacguguugucuacggtt

SEQ ID NO: 777 - DNA, 21 bp, Artificial Sequence
  Description of Combined DNA/RNA Molecule: Synthetic oligonucleotide
  Description of Artificial Sequence: Synthetic oligonucleotide
cguagacaacacguguguatt

SEQ ID NO: 778 - DNA, 21 bp, Artificial Sequence
  Description of Combined DNA/RNA Molecule: Synthetic oligonucleotide
  Description of Artificial Sequence: Synthetic oligonucleotide
uacacacguguugucuacgtt

SEQ ID NO: 779 - DNA, 21 bp, Artificial Sequence
  Description of Combined DNA/RNA Molecule: Synthetic oligonucleotide
  Description of Artificial Sequence: Synthetic oligonucleotide
uagacaacacguguguagutt

SEQ ID NO: 780 - DNA, 21 bp, Artificial Sequence
  Description of Combined DNA/RNA Molecule: Synthetic oligonucleotide
  Description of Artificial Sequence: Synthetic oligonucleotide
acuacacacguguugucuatt

SEQ ID NO: 781 - DNA, 21 bp, Artificial Sequence
  Description of Combined DNA/RNA Molecule: Synthetic oligonucleotide
  Description of Artificial Sequence: Synthetic oligonucleotide
agacaacacguguguaguctt

SEQ ID NO: 782 - DNA, 21 bp, Artificial Sequence
  Description of Combined DNA/RNA Molecule: Synthetic oligonucleotide
  Description of Artificial Sequence: Synthetic oligonucleotide
gacuacacacguguugucutt

SEQ ID NO: 783 - DNA, 21 bp, Artificial Sequence
  Description of Combined DNA/RNA Molecule: Synthetic oligonucleotide
  Description of Artificial Sequence: Synthetic oligonucleotide
gacaacacguguguagucatt

SEQ ID NO: 784 - DNA, 21 bp, Artificial Sequence
  Description of Combined DNA/RNA Molecule: Synthetic oligonucleotide
  Description of Artificial Sequence: Synthetic oligonucleotide
ugacuacacacguguuguctt

SEQ ID NO: 785 - DNA, 21 bp, Artificial Sequence
  Description of Combined DNA/RNA Molecule: Synthetic oligonucleotide
  Description of Artificial Sequence: Synthetic oligonucleotide
acaacacguguguagucagtt

SEQ ID NO: 786 - DNA, 21 bp, Artificial Sequence
  Description of Combined DNA/RNA Molecule: Synthetic oligonucleotide
  Description of Artificial Sequence: Synthetic oligonucleotide
cugacuacacacguguugutt

SEQ ID NO: 787 - DNA, 21 bp, Artificial Sequence
  Description of Combined DNA/RNA Molecule: Synthetic oligonucleotide
  Description of Artificial Sequence: Synthetic oligonucleotide
caacacguguguagucaggtt

SEQ ID NO: 788 - DNA, 21 bp, Artificial Sequence
  Description of Combined DNA/RNA Molecule: Synthetic oligonucleotide
  Description of Artificial Sequence: Synthetic oligonucleotide
ccugacuacacacguguugtt

SEQ ID NO: 789 - DNA, 21 bp, Artificial Sequence
  Description of Combined DNA/RNA Molecule: Synthetic oligonucleotide
  Description of Artificial Sequence: Synthetic oligonucleotide
cacguguguagucaggagctt

SEQ ID NO: 790 - DNA, 21 bp, Artificial Sequence
  Description of Combined DNA/RNA Molecule: Synthetic oligonucleotide
  Description of Artificial Sequence: Synthetic oligonucleotide
gcuccugacuacacacgugtt

SEQ ID NO: 791 - DNA, 21 bp, Artificial Sequence
  Description of Combined DNA/RNA Molecule: Synthetic oligonucleotide
  Description of Artificial Sequence: Synthetic oligonucleotide
acguguguagucaggagcctt

SEQ ID NO: 792 - DNA, 21 bp, Artificial Sequence
  Description of Combined DNA/RNA Molecule: Synthetic oligonucleotide
  Description of Artificial Sequence: Synthetic oligonucleotide
ggcuccugacuacacacgutt

SEQ ID NO: 793 - DNA, 21 bp, Artificial Sequence
  Description of Combined DNA/RNA Molecule: Synthetic oligonucleotide
  Description of Artificial Sequence: Synthetic oligonucleotide
cguguguagucaggagccgtt

SEQ ID NO: 794 - DNA, 21 bp, Artificial Sequence
  Description of Combined DNA/RNA Molecule: Synthetic oligonucleotide
  Description of Artificial Sequence: Synthetic oligonucleotide
cggcuccugacuacacacgtt

SEQ ID NO: 795 - DNA, 21 bp, Artificial Sequence
  Description of Combined DNA/RNA Molecule: Synthetic oligonucleotide
  Description of Artificial Sequence: Synthetic oligonucleotide
uguguagucaggagccgggtt

SEQ ID NO: 796 - DNA, 21 bp, Artificial Sequence
  Description of Combined DNA/RNA Molecule: Synthetic oligonucleotide
  Description of Artificial Sequence: Synthetic oligonucleotide
cccggcuccugacuacacatt

SEQ ID NO: 797 - DNA, 21 bp, Artificial Sequence
  Description of Combined DNA/RNA Molecule: Synthetic oligonucleotide
  Description of Artificial Sequence: Synthetic oligonucleotide
gucaggagccgggacgucatt

SEQ ID NO: 798 - DNA, 21 bp, Artificial Sequence
  Description of Combined DNA/RNA Molecule: Synthetic oligonucleotide
  Description of Artificial Sequence: Synthetic oligonucleotide
ugacgucccggcuccugactt

SEQ ID NO: 799 - DNA, 21 bp, Artificial Sequence
  Description of Combined DNA/RNA Molecule: Synthetic oligonucleotide
  Description of Artificial Sequence: Synthetic oligonucleotide
gucaggagccgggacgucatt

SEQ ID NO: 800 - DNA, 21 bp, Artificial Sequence
  Description of Combined DNA/RNA Molecule: Synthetic oligonucleotide
  Description of Artificial Sequence: Synthetic oligonucleotide
ugacgucccggcuccugactt

SEQ ID NO: 801 - DNA, 21 bp, Artificial Sequence
  Description of Combined DNA/RNA Molecule: Synthetic oligonucleotide
  Description of Artificial Sequence: Synthetic oligonucleotide
ucaggagccgggacgucagtt

SEQ ID NO: 802 - DNA, 21 bp, Artificial Sequence
  Description of Combined DNA/RNA Molecule: Synthetic oligonucleotide
  Description of Artificial Sequence: Synthetic oligonucleotide
cugacgucccggcuccugatt

SEQ ID NO: 803 - DNA, 21 bp, Artificial Sequence
  Description of Combined DNA/RNA Molecule: Synthetic oligonucleotide
  Description of Artificial Sequence: Synthetic oligonucleotide
ucaggagccgggacgucagtt

SEQ ID NO: 804 - DNA, 21 bp, Artificial Sequence
  Description of Combined DNA/RNA Molecule: Synthetic oligonucleotide
  Description of Artificial Sequence: Synthetic oligonucleotide
cugacgucccggcuccugatt

SEQ ID NO: 805 - DNA, 21 bp, Artificial Sequence
  Description of Combined DNA/RNA Molecule: Synthetic oligonucleotide
  Description of Artificial Sequence: Synthetic oligonucleotide
caggagccgggacgucagctt

SEQ ID NO: 806 - DNA, 21 bp, Artificial Sequence
  Description of Combined DNA/RNA Molecule: Synthetic oligonucleotide
  Description of Artificial Sequence: Synthetic oligonucleotide
gcugacgucccggcuccugtt

SEQ ID NO: 807 - DNA, 21 bp, Artificial Sequence
  Description of Combined DNA/RNA Molecule: Synthetic oligonucleotide
  Description of Artificial Sequence: Synthetic oligonucleotide
caggagccgggacgucagctt

SEQ ID NO: 808 - DNA, 21 bp, Artificial Sequence
  Description of Combined DNA/RNA Molecule: Synthetic oligonucleotide
  Description of Artificial Sequence: Synthetic oligonucleotide
gcugacgucccggcuccugtt

SEQ ID NO: 809 - DNA, 21 bp, Artificial Sequence
  Description of Combined DNA/RNA Molecule: Synthetic oligonucleotide
  Description of Artificial Sequence: Synthetic oligonucleotide
agccgggacgucagcacuatt

SEQ ID NO: 810 - DNA, 21 bp, Artificial Sequence
  Description of Combined DNA/RNA Molecule: Synthetic oligonucleotide
  Description of Artificial Sequence: Synthetic oligonucleotide
uagugcugacgucccggcutt

SEQ ID NO: 811 - DNA, 21 bp, Artificial Sequence
  Description of Combined DNA/RNA Molecule: Synthetic oligonucleotide
  Description of Artificial Sequence: Synthetic oligonucleotide
ccgggacgucagcacuacatt

SEQ ID NO: 812 - DNA, 21 bp, Artificial Sequence
  Description of Combined DNA/RNA Molecule: Synthetic oligonucleotide
  Description of Artificial Sequence: Synthetic oligonucleotide
uguagugcugacgucccggtt

SEQ ID NO: 813 - DNA, 21 bp, Artificial Sequence
  Description of Combined DNA/RNA Molecule: Synthetic oligonucleotide
  Description of Artificial Sequence: Synthetic oligonucleotide
ccgugacagccguugccautt

SEQ ID NO: 814 - DNA, 21 bp, Artificial Sequence
  Description of Combined DNA/RNA Molecule: Synthetic oligonucleotide
  Description of Artificial Sequence: Synthetic oligonucleotide
auggcaacggcugucacggtt

SEQ ID NO: 815 - DNA, 21 bp, Artificial Sequence
  Description of Combined DNA/RNA Molecule: Synthetic oligonucleotide
  Description of Artificial Sequence: Synthetic oligonucleotide
gccaucugcugccggagcctt

SEQ ID NO: 816 - DNA, 21 bp, Artificial Sequence
  Description of Combined DNA/RNA Molecule: Synthetic oligonucleotide
  Description of Artificial Sequence: Synthetic oligonucleotide
ggcuccggcagcagauggctt

SEQ ID NO: 817 - DNA, 21 bp, Artificial Sequence
  Description of Combined DNA/RNA Molecule: Synthetic oligonucleotide
  Description of Artificial Sequence: Synthetic oligonucleotide
cccaucccaggaugggugutt

SEQ ID NO: 818 - DNA, 21 bp, Artificial Sequence
  Description of Combined DNA/RNA Molecule: Synthetic oligonucleotide
  Description of Artificial Sequence: Synthetic oligonucleotide
acacccauccugggaugggtt

SEQ ID NO: 819 - DNA, 21 bp, Artificial Sequence
  Description of Combined DNA/RNA Molecule: Synthetic oligonucleotide
  Description of Artificial Sequence: Synthetic oligonucleotide
caucccaggaugggugucutt

SEQ ID NO: 820 - DNA, 21 bp, Artificial Sequence
  Description of Combined DNA/RNA Molecule: Synthetic oligonucleotide
  Description of Artificial Sequence: Synthetic oligonucleotide
agacacccauccugggaugtt

SEQ ID NO: 821 - DNA, 21 bp, Artificial Sequence
  Description of Combined DNA/RNA Molecule: Synthetic oligonucleotide
  Description of Artificial Sequence: Synthetic oligonucleotide
agcuuuaaaaugguuccgatt

SEQ ID NO: 822 - DNA, 21 bp, Artificial Sequence
  Description of Combined DNA/RNA Molecule: Synthetic oligonucleotide
  Description of Artificial Sequence: Synthetic oligonucleotide
ucggaaccauuuuaaagcutt

SEQ ID NO: 823 - DNA, 21 bp, Artificial Sequence
  Description of Combined DNA/RNA Molecule: Synthetic oligonucleotide
  Description of Artificial Sequence: Synthetic oligonucleotide
gcuuuaaaaugguuccgactt

SEQ ID NO: 824 - DNA, 21 bp, Artificial Sequence
  Description of Combined DNA/RNA Molecule: Synthetic oligonucleotide
  Description of Artificial Sequence: Synthetic oligonucleotide
gucggaaccauuuuaaagctt

SEQ ID NO: 825 - DNA, 21 bp, Artificial Sequence
  Description of Combined DNA/RNA Molecule: Synthetic oligonucleotide
  Description of Artificial Sequence: Synthetic oligonucleotide
cuuuaaaaugguuccgacutt

SEQ ID NO: 826 - DNA, 21 bp, Artificial Sequence
  Description of Combined DNA/RNA Molecule: Synthetic oligonucleotide
  Description of Artificial Sequence: Synthetic oligonucleotide
agucggaaccauuuuaaagtt

SEQ ID NO: 827 - DNA, 21 bp, Artificial Sequence
  Description of Combined DNA/RNA Molecule: Synthetic oligonucleotide
  Description of Artificial Sequence: Synthetic oligonucleotide
uuuaaaaugguuccgacuutt

SEQ ID NO: 828 - DNA, 21 bp, Artificial Sequence
  Description of Combined DNA/RNA Molecule: Synthetic oligonucleotide
  Description of Artificial Sequence: Synthetic oligonucleotide
aagucggaaccauuuuaaatt

SEQ ID NO: 829 - DNA, 21 bp, Artificial Sequence
  Description of Combined DNA/RNA Molecule: Synthetic oligonucleotide
  Description of Artificial Sequence: Synthetic oligonucleotide
uuaaaaugguuccgacuugtt

SEQ ID NO: 830 - DNA, 21 bp, Artificial Sequence
  Description of Combined DNA/RNA Molecule: Synthetic oligonucleotide
  Description of Artificial Sequence: Synthetic oligonucleotide
caagucggaaccauuuuaatt

SEQ ID NO: 831 - DNA, 21 bp, Artificial Sequence
  Description of Combined DNA/RNA Molecule: Synthetic oligonucleotide
  Description of Artificial Sequence: Synthetic oligonucleotide
uaaaaugguuccgacuugutt

SEQ ID NO: 832 - DNA, 21 bp, Artificial Sequence
  Description of Combined DNA/RNA Molecule: Synthetic oligonucleotide
  Description of Artificial Sequence: Synthetic oligonucleotide
acaagucggaaccauuuuatt

SEQ ID NO: 833 - DNA, 21 bp, Artificial Sequence
  Description of Combined DNA/RNA Molecule: Synthetic oligonucleotide
  Description of Artificial Sequence: Synthetic oligonucleotide
aaaaugguuccgacuuguctt

SEQ ID NO: 834 - DNA, 21 bp, Artificial Sequence
  Description of Combined DNA/RNA Molecule: Synthetic oligonucleotide
  Description of Artificial Sequence: Synthetic oligonucleotide
gacaagucggaaccauuuutt

SEQ ID NO: 835 - DNA, 21 bp, Artificial Sequence
  Description of Combined DNA/RNA Molecule: Synthetic oligonucleotide
  Description of Artificial Sequence: Synthetic oligonucleotide
aaaugguuccgacuugucctt

SEQ ID NO: 836 - DNA, 21 bp, Artificial Sequence
  Description of Combined DNA/RNA Molecule: Synthetic oligonucleotide
  Description of Artificial Sequence: Synthetic oligonucleotide
ggacaagucggaaccauuutt

SEQ ID NO: 837 - DNA, 21 bp, Artificial Sequence
  Description of Combined DNA/RNA Molecule: Synthetic oligonucleotide
  Description of Artificial Sequence: Synthetic oligonucleotide
aaugguuccgacuuguccctt

SEQ ID NO: 838 - DNA, 21 bp, Artificial Sequence
  Description of Combined DNA/RNA Molecule: Synthetic oligonucleotide
  Description of Artificial Sequence: Synthetic oligonucleotide
gggacaagucggaaccauutt

SEQ ID NO: 839 - DNA, 21 bp, Artificial Sequence
  Description of Combined DNA/RNA Molecule: Synthetic oligonucleotide
  Description of Artificial Sequence: Synthetic oligonucleotide
gguuccgacuugucccucutt

SEQ ID NO: 840 - DNA, 21 bp, Artificial Sequence
  Description of Combined DNA/RNA Molecule: Synthetic oligonucleotide
  Description of Artificial Sequence: Synthetic oligonucleotide
agagggacaagucggaacctt

SEQ ID NO: 841 - DNA, 21 bp, Artificial Sequence
  Description of Combined DNA/RNA Molecule: Synthetic oligonucleotide
  Description of Artificial Sequence: Synthetic oligonucleotide
cuccauggccuggcacgagtt

SEQ ID NO: 842 - DNA, 21 bp, Artificial Sequence
  Description of Combined DNA/RNA Molecule: Synthetic oligonucleotide
  Description of Artificial Sequence: Synthetic oligonucleotide
cucgugccaggccauggagtt

SEQ ID NO: 843 - DNA, 21 bp, Artificial Sequence
  Description of Combined DNA/RNA Molecule: Synthetic oligonucleotide
  Description of Artificial Sequence: Synthetic oligonucleotide
ccauggccuggcacgagggtt

SEQ ID NO: 844 - DNA, 21 bp, Artificial Sequence
  Description of Combined DNA/RNA Molecule: Synthetic oligonucleotide
  Description of Artificial Sequence: Synthetic oligonucleotide
cccucgugccaggccauggtt

SEQ ID NO: 845 - DNA, 21 bp, Artificial Sequence
  Description of Combined DNA/RNA Molecule: Synthetic oligonucleotide
  Description of Artificial Sequence: Synthetic oligonucleotide
gaacucacucacucugggutt

SEQ ID NO: 846 - DNA, 21 bp, Artificial Sequence
  Description of Combined DNA/RNA Molecule: Synthetic oligonucleotide
  Description of Artificial Sequence: Synthetic oligonucleotide
acccagagugagugaguuctt

SEQ ID NO: 847 - DNA, 21 bp, Artificial Sequence
  Description of Combined DNA/RNA Molecule: Synthetic oligonucleotide
  Description of Artificial Sequence: Synthetic oligonucleotide
ucacucacucugggugccutt

SEQ ID NO: 848 - DNA, 21 bp, Artificial Sequence
  Description of Combined DNA/RNA Molecule: Synthetic oligonucleotide
  Description of Artificial Sequence: Synthetic oligonucleotide
aggcacccagagugagugatt

SEQ ID NO: 849 - DNA, 21 bp, Artificial Sequence
  Description of Combined DNA/RNA Molecule: Synthetic oligonucleotide
  Description of Artificial Sequence: Synthetic oligonucleotide
uuucaccauucaaacaggutt

SEQ ID NO: 850 - DNA, 21 bp, Artificial Sequence
  Description of Combined DNA/RNA Molecule: Synthetic oligonucleotide
  Description of Artificial Sequence: Synthetic oligonucleotide
accuguuugaauggugaaatt

SEQ ID NO: 851 - DNA, 21 bp, Artificial Sequence
  Description of Combined DNA/RNA Molecule: Synthetic oligonucleotide
  Description of Artificial Sequence: Synthetic oligonucleotide
cauucaaacaggucgagcutt

SEQ ID NO: 852 - DNA, 21 bp, Artificial Sequence
  Description of Combined DNA/RNA Molecule: Synthetic oligonucleotide
  Description of Artificial Sequence: Synthetic oligonucleotide
agcucgaccuguuugaaugtt

SEQ ID NO: 853 - DNA, 21 bp, Artificial Sequence
  Description of Combined DNA/RNA Molecule: Synthetic oligonucleotide
  Description of Artificial Sequence: Synthetic oligonucleotide
auucaaacaggucgagcugtt

SEQ ID NO: 854 - DNA, 21 bp, Artificial Sequence
  Description of Combined DNA/RNA Molecule: Synthetic oligonucleotide
  Description of Artificial Sequence: Synthetic oligonucleotide
cagcucgaccuguuugaautt

SEQ ID NO: 855 - DNA, 21 bp, Artificial Sequence
  Description of Combined DNA/RNA Molecule: Synthetic oligonucleotide
  Description of Artificial Sequence: Synthetic oligonucleotide
uucaaacaggucgagcugutt

SEQ ID NO: 856 - DNA, 21 bp, Artificial Sequence
  Description of Combined DNA/RNA Molecule: Synthetic oligonucleotide
  Description of Artificial Sequence: Synthetic oligonucleotide
acagcucgaccuguuugaatt

SEQ ID NO: 857 - DNA, 21 bp, Artificial Sequence
  Description of Combined DNA/RNA Molecule: Synthetic oligonucleotide
  Description of Artificial Sequence: Synthetic oligonucleotide
ucaaacaggucgagcugugtt

SEQ ID NO: 858 - DNA, 21 bp, Artificial Sequence
  Description of Combined DNA/RNA Molecule: Synthetic oligonucleotide
  Description of Artificial Sequence: Synthetic oligonucleotide
cacagcucgaccuguuugatt

SEQ ID NO: 859 - DNA, 21 bp, Artificial Sequence
  Description of Combined DNA/RNA Molecule: Synthetic oligonucleotide
  Description of Artificial Sequence: Synthetic oligonucleotide
caaacaggucgagcugugctt

SEQ ID NO: 860 - DNA, 21 bp, Artificial Sequence
  Description of Combined DNA/RNA Molecule: Synthetic oligonucleotide
  Description of Artificial Sequence: Synthetic oligonucleotide
gcacagcucgaccuguuugtt

SEQ ID NO: 861 - DNA, 21 bp, Artificial Sequence
  Description of Combined DNA/RNA Molecule: Synthetic oligonucleotide
  Description of Artificial Sequence: Synthetic oligonucleotide
aaacaggucgagcugugcutt

SEQ ID NO: 862 - DNA, 21 bp, Artificial Sequence
  Description of Combined DNA/RNA Molecule: Synthetic oligonucleotide
  Description of Artificial Sequence: Synthetic oligonucleotide
agcacagcucgaccuguuutt

SEQ ID NO: 863 - DNA, 21 bp, Artificial Sequence
  Description of Combined DNA/RNA Molecule: Synthetic oligonucleotide
  Description of Artificial Sequence: Synthetic oligonucleotide
aacaggucgagcugugcuctt

SEQ ID NO: 864 - DNA, 21 bp, Artificial Sequence
  Description of Combined DNA/RNA Molecule: Synthetic oligonucleotide
  Description of Artificial Sequence: Synthetic oligonucleotide
gagcacagcucgaccuguutt

SEQ ID NO: 865 - DNA, 21 bp, Artificial Sequence
  Description of Combined DNA/RNA Molecule: Synthetic oligonucleotide
  Description of Artificial Sequence: Synthetic oligonucleotide
caggucgagcugugcucggtt

SEQ ID NO: 866 - DNA, 21 bp, Artificial Sequence
  Description of Combined DNA/RNA Molecule: Synthetic oligonucleotide
  Description of Artificial Sequence: Synthetic oligonucleotide
ccgagcacagcucgaccugtt

SEQ ID NO: 867 - DNA, 21 bp, Artificial Sequence
  Description of Combined DNA/RNA Molecule: Synthetic oligonucleotide
  Description of Artificial Sequence: Synthetic oligonucleotide
aggucgagcugugcucgggtt

SEQ ID NO: 868 - DNA, 21 bp, Artificial Sequence
  Description of Combined DNA/RNA Molecule: Synthetic oligonucleotide
  Description of Artificial Sequence: Synthetic oligonucleotide
cccgagcacagcucgaccutt

SEQ ID NO: 869 - DNA, 21 bp, Artificial Sequence
  Description of Combined DNA/RNA Molecule: Synthetic oligonucleotide
  Description of Artificial Sequence: Synthetic oligonucleotide
gucgagcugugcucgggugtt

SEQ ID NO: 870 - DNA, 21 bp, Artificial Sequence
  Description of Combined DNA/RNA Molecule: Synthetic oligonucleotide
  Description of Artificial Sequence: Synthetic oligonucleotide
cacccgagcacagcucgactt

SEQ ID NO: 871 - DNA, 21 bp, Artificial Sequence
  Description of Combined DNA/RNA Molecule: Synthetic oligonucleotide
  Description of Artificial Sequence: Synthetic oligonucleotide
ucgagcugugcucgggugctt

SEQ ID NO: 872 - DNA, 21 bp, Artificial Sequence
  Description of Combined DNA/RNA Molecule: Synthetic oligonucleotide
  Description of Artificial Sequence: Synthetic oligonucleotide
gcacccgagcacagcucgatt

SEQ ID NO: 873 - DNA, 21 bp, Artificial Sequence
  Description of Combined DNA/RNA Molecule: Synthetic oligonucleotide
  Description of Artificial Sequence: Synthetic oligonucleotide
agcugcucccaaugugccgtt

SEQ ID NO: 874 - DNA, 21 bp, Artificial Sequence
  Description of Combined DNA/RNA Molecule: Synthetic oligonucleotide
  Description of Artificial Sequence: Synthetic oligonucleotide
cggcacauugggagcagcutt

SEQ ID NO: 875 - DNA, 21 bp, Artificial Sequence
  Description of Combined DNA/RNA Molecule: Synthetic oligonucleotide
  Description of Artificial Sequence: Synthetic oligonucleotide
gcugcucccaaugugccgatt

SEQ ID NO: 876 - DNA, 21 bp, Artificial Sequence
  Description of Combined DNA/RNA Molecule: Synthetic oligonucleotide
  Description of Artificial Sequence: Synthetic oligonucleotide
ucggcacauugggagcagctt

SEQ ID NO: 877 - DNA, 21 bp, Artificial Sequence
  Description of Combined DNA/RNA Molecule: Synthetic oligonucleotide
  Description of Artificial Sequence: Synthetic oligonucleotide
ugcucccaaugugccgaugtt

SEQ ID NO: 878 - DNA, 21 bp, Artificial Sequence
  Description of Combined DNA/RNA Molecule: Synthetic oligonucleotide
  Description of Artificial Sequence: Synthetic oligonucleotide
caucggcacauugggagcatt

SEQ ID NO: 879 - DNA, 21 bp, Artificial Sequence
  Description of Combined DNA/RNA Molecule: Synthetic oligonucleotide
  Description of Artificial Sequence: Synthetic oligonucleotide
ucccaaugugccgaugucctt

SEQ ID NO: 880 - DNA, 21 bp, Artificial Sequence
  Description of Combined DNA/RNA Molecule: Synthetic oligonucleotide
  Description of Artificial Sequence: Synthetic oligonucleotide
ggacaucggcacauugggatt

SEQ ID NO: 881 - DNA, 21 bp, Artificial Sequence
  Description of Combined DNA/RNA Molecule: Synthetic oligonucleotide
  Description of Artificial Sequence: Synthetic oligonucleotide
ccaaugugccgauguccgutt

SEQ ID NO: 882 - DNA, 21 bp, Artificial Sequence
  Description of Combined DNA/RNA Molecule: Synthetic oligonucleotide
  Description of Artificial Sequence: Synthetic oligonucleotide
acggacaucggcacauuggtt

SEQ ID NO: 883 - DNA, 21 bp, Artificial Sequence
  Description of Combined DNA/RNA Molecule: Synthetic oligonucleotide
  Description of Artificial Sequence: Synthetic oligonucleotide
caaugugccgauguccgugtt

SEQ ID NO: 884 - DNA, 21 bp, Artificial Sequence
  Description of Combined DNA/RNA Molecule: Synthetic oligonucleotide
  Description of Artificial Sequence: Synthetic oligonucleotide
cacggacaucggcacauugtt

SEQ ID NO: 885 - DNA, 21 bp, Artificial Sequence
  Description of Combined DNA/RNA Molecule: Synthetic oligonucleotide
  Description of Artificial Sequence: Synthetic oligonucleotide
aaugugccgauguccguggtt

SEQ ID NO: 886 - DNA, 21 bp, Artificial Sequence
  Description of Combined DNA/RNA Molecule: Synthetic oligonucleotide
  Description of Artificial Sequence: Synthetic oligonucleotide
ccacggacaucggcacauutt

SEQ ID NO: 887 - DNA, 21 bp, Artificial Sequence
  Description of Combined DNA/RNA Molecule: Synthetic oligonucleotide
  Description of Artificial Sequence: Synthetic oligonucleotide
ccgauguccgugggcagaatt

SEQ ID NO: 888 - DNA, 21 bp, Artificial Sequence
  Description of Combined DNA/RNA Molecule: Synthetic oligonucleotide
  Description of Artificial Sequence: Synthetic oligonucleotide
uucugcccacggacaucggtt

SEQ ID NO: 889 - DNA, 21 bp, Artificial Sequence
  Description of Combined DNA/RNA Molecule: Synthetic oligonucleotide
  Description of Artificial Sequence: Synthetic oligonucleotide
gauguccgugggcagaaugtt

SEQ ID NO: 890 - DNA, 21 bp, Artificial Sequence
  Description of Combined DNA/RNA Molecule: Synthetic oligonucleotide
  Description of Artificial Sequence: Synthetic oligonucleotide
cauucugcccacggacauctt

SEQ ID NO: 891 - DNA, 21 bp, Artificial Sequence
  Description of Combined DNA/RNA Molecule: Synthetic oligonucleotide
  Description of Artificial Sequence: Synthetic oligonucleotide
guccgugggcagaaugacutt

SEQ ID NO: 892 - DNA, 21 bp, Artificial Sequence
  Description of Combined DNA/RNA Molecule: Synthetic oligonucleotide
  Description of Artificial Sequence: Synthetic oligonucleotide
agucauucugcccacggactt

SEQ ID NO: 893 - DNA, 21 bp, Artificial Sequence
  Description of Combined DNA/RNA Molecule: Synthetic oligonucleotide
  Description of Artificial Sequence: Synthetic oligonucleotide
uccgugggcagaaugacuutt

SEQ ID NO: 894 - DNA, 21 bp, Artificial Sequence
  Description of Combined DNA/RNA Molecule: Synthetic oligonucleotide
  Description of Artificial Sequence: Synthetic oligonucleotide
aagucauucugcccacggatt

SEQ ID NO: 895 - DNA, 21 bp, Artificial Sequence
  Description of Combined DNA/RNA Molecule: Synthetic oligonucleotide
  Description of Artificial Sequence: Synthetic oligonucleotide
ugggcagaaugacuuuuautt

SEQ ID NO: 896 - DNA, 21 bp, Artificial Sequence
  Description of Combined DNA/RNA Molecule: Synthetic oligonucleotide
  Description of Artificial Sequence: Synthetic oligonucleotide
auaaaagucauucugcccatt

SEQ ID NO: 897 - DNA, 21 bp, Artificial Sequence
  Description of Combined DNA/RNA Molecule: Synthetic oligonucleotide
  Description of Artificial Sequence: Synthetic oligonucleotide
acuuuuauugagcucuugutt

SEQ ID NO: 898 - DNA, 21 bp, Artificial Sequence
  Description of Combined DNA/RNA Molecule: Synthetic oligonucleotide
  Description of Artificial Sequence: Synthetic oligonucleotide
acaagagcucaauaaaagutt

SEQ ID NO: 899 - DNA, 21 bp, Artificial Sequence
  Description of Combined DNA/RNA Molecule: Synthetic oligonucleotide
  Description of Artificial Sequence: Synthetic oligonucleotide
auugagcucuuguuccgugtt

SEQ ID NO: 900 - DNA, 21 bp, Artificial Sequence
  Description of Combined DNA/RNA Molecule: Synthetic oligonucleotide
  Description of Artificial Sequence: Synthetic oligonucleotide
cacggaacaagagcucaautt

SEQ ID NO: 901 - DNA, 21 bp, Artificial Sequence
  Description of Combined DNA/RNA Molecule: Synthetic oligonucleotide
  Description of Artificial Sequence: Synthetic oligonucleotide
agcucuuguuccgugccagtt

SEQ ID NO: 902 - DNA, 21 bp, Artificial Sequence
  Description of Combined DNA/RNA Molecule: Synthetic oligonucleotide
  Description of Artificial Sequence: Synthetic oligonucleotide
cuggcacggaacaagagcutt

SEQ ID NO: 903 - DNA, 21 bp, Artificial Sequence
  Description of Combined DNA/RNA Molecule: Synthetic oligonucleotide
  Description of Artificial Sequence: Synthetic oligonucleotide
gcucuuguuccgugccaggtt

SEQ ID NO: 904 - DNA, 21 bp, Artificial Sequence
  Description of Combined DNA/RNA Molecule: Synthetic oligonucleotide
  Description of Artificial Sequence: Synthetic oligonucleotide
ccuggcacggaacaagagctt

SEQ ID NO: 905 - DNA, 21 bp, Artificial Sequence
  Description of Combined DNA/RNA Molecule: Synthetic oligonucleotide
  Description of Artificial Sequence: Synthetic oligonucleotide
uguuccgugccaggcauuctt

SEQ ID NO: 906 - DNA, 21 bp, Artificial Sequence
  Description of Combined DNA/RNA Molecule: Synthetic oligonucleotide
  Description of Artificial Sequence: Synthetic oligonucleotide
gaaugccuggcacggaacatt

SEQ ID NO: 907 - DNA, 21 bp, Artificial Sequence
  Description of Combined DNA/RNA Molecule: Synthetic oligonucleotide
  Description of Artificial Sequence: Synthetic oligonucleotide
guuccgugccaggcauucatt

SEQ ID NO: 908 - DNA, 21 bp, Artificial Sequence
  Description of Combined DNA/RNA Molecule: Synthetic oligonucleotide
  Description of Artificial Sequence: Synthetic oligonucleotide
ugaaugccuggcacggaactt

SEQ ID NO: 909 - DNA, 21 bp, Artificial Sequence
  Description of Combined DNA/RNA Molecule: Synthetic oligonucleotide
  Description of Artificial Sequence: Synthetic oligonucleotide
uuccgugccaggcauucaatt

SEQ ID NO: 910 - DNA, 21 bp, Artificial Sequence
  Description of Combined DNA/RNA Molecule: Synthetic oligonucleotide
  Description of Artificial Sequence: Synthetic oligonucleotide
uugaaugccuggcacggaatt

SEQ ID NO: 911 - DNA, 21 bp, Artificial Sequence
  Description of Combined DNA/RNA Molecule: Synthetic oligonucleotide
  Description of Artificial Sequence: Synthetic oligonucleotide
cgugccaggcauucaaucctt

SEQ ID NO: 912 - DNA, 21 bp, Artificial Sequence
  Description of Combined DNA/RNA Molecule: Synthetic oligonucleotide
  Description of Artificial Sequence: Synthetic oligonucleotide
ggauugaaugccuggcacgtt

SEQ ID NO: 913 - DNA, 21 bp, Artificial Sequence
  Description of Combined DNA/RNA Molecule: Synthetic oligonucleotide
  Description of Artificial Sequence: Synthetic oligonucleotide
gugccaggcauucaauccutt

SEQ ID NO: 914 - DNA, 21 bp, Artificial Sequence
  Description of Combined DNA/RNA Molecule: Synthetic oligonucleotide
  Description of Artificial Sequence: Synthetic oligonucleotide
aggauugaaugccuggcactt

SEQ ID NO: 915 - DNA, 21 bp, Artificial Sequence
  Description of Combined DNA/RNA Molecule: Synthetic oligonucleotide
  Description of Artificial Sequence: Synthetic oligonucleotide
caauccucaggucuccacctt

SEQ ID NO: 916 - DNA, 21 bp, Artificial Sequence
  Description of Combined DNA/RNA Molecule: Synthetic oligonucleotide
  Description of Artificial Sequence: Synthetic oligonucleotide
gguggagaccugaggauugtt

SEQ ID NO: 917 - DNA, 21 bp, Artificial Sequence
  Description of Combined DNA/RNA Molecule: Synthetic oligonucleotide
  Description of Artificial Sequence: Synthetic oligonucleotide
caccaaggaggcaggauuctt

SEQ ID NO: 918 - DNA, 21 bp, Artificial Sequence
  Description of Combined DNA/RNA Molecule: Synthetic oligonucleotide
  Description of Artificial Sequence: Synthetic oligonucleotide
gaauccugccuccuuggugtt

SEQ ID NO: 919 - DNA, 21 bp, Artificial Sequence
  Description of Combined DNA/RNA Molecule: Synthetic oligonucleotide
  Description of Artificial Sequence: Synthetic oligonucleotide
caccaaggaggcaggauuctt

SEQ ID NO: 920 - DNA, 21 bp, Artificial Sequence
  Description of Combined DNA/RNA Molecule: Synthetic oligonucleotide
  Description of Artificial Sequence: Synthetic oligonucleotide
gaauccugccuccuuggugtt

SEQ ID NO: 921 - DNA, 21 bp, Artificial Sequence
  Description of Combined DNA/RNA Molecule: Synthetic oligonucleotide
  Description of Artificial Sequence: Synthetic oligonucleotide
caccaaggaggcaggauuctt

SEQ ID NO: 922 - DNA, 21 bp, Artificial Sequence
  Description of Combined DNA/RNA Molecule: Synthetic oligonucleotide
  Description of Artificial Sequence: Synthetic oligonucleotide
gaauccugccuccuuggugtt

SEQ ID NO: 923 - DNA, 21 bp, Artificial Sequence
  Description of Combined DNA/RNA Molecule: Synthetic oligonucleotide
  Description of Artificial Sequence: Synthetic oligonucleotide
caccaaggaggcaggauuctt

SEQ ID NO: 924 - DNA, 21 bp, Artificial Sequence
  Description of Combined DNA/RNA Molecule: Synthetic oligonucleotide
  Description of Artificial Sequence: Synthetic oligonucleotide
gaauccugccuccuuggugtt

SEQ ID NO: 925 - DNA, 21 bp, Artificial Sequence
  Description of Combined DNA/RNA Molecule: Synthetic oligonucleotide
  Description of Artificial Sequence: Synthetic oligonucleotide
caccaaggaggcaggauuctt

SEQ ID NO: 926 - DNA, 21 bp, Artificial Sequence
  Description of Combined DNA/RNA Molecule: Synthetic oligonucleotide
  Description of Artificial Sequence: Synthetic oligonucleotide
gaauccugccuccuuggugtt

SEQ ID NO: 927 - DNA, 21 bp, Artificial Sequence
  Description of Combined DNA/RNA Molecule: Synthetic oligonucleotide
  Description of Artificial Sequence: Synthetic oligonucleotide
caccaaggaggcaggauuctt

SEQ ID NO: 928 - DNA, 21 bp, Artificial Sequence
  Description of Combined DNA/RNA Molecule: Synthetic oligonucleotide
  Description of Artificial Sequence: Synthetic oligonucleotide
gaauccugccuccuuggugtt

SEQ ID NO: 929 - DNA, 21 bp, Artificial Sequence
  Description of Combined DNA/RNA Molecule: Synthetic oligonucleotide
  Description of Artificial Sequence: Synthetic oligonucleotide
caccaaggaggcaggauuctt

SEQ ID NO: 930 - DNA, 21 bp, Artificial Sequence
  Description of Combined DNA/RNA Molecule: Synthetic oligonucleotide
  Description of Artificial Sequence: Synthetic oligonucleotide
gaauccugccuccuuggugtt

SEQ ID NO: 931 - DNA, 21 bp, Artificial Sequence
  Description of Combined DNA/RNA Molecule: Synthetic oligonucleotide
  Description of Artificial Sequence: Synthetic oligonucleotide
caccaaggaggcaggauuctt

SEQ ID NO: 932 - DNA, 21 bp, Artificial Sequence
  Description of Combined DNA/RNA Molecule: Synthetic oligonucleotide
  Description of Artificial Sequence: Synthetic oligonucleotide
gaauccugccuccuuggugtt

SEQ ID NO: 933 - DNA, 21 bp, Artificial Sequence
  Description of Combined DNA/RNA Molecule: Synthetic oligonucleotide
  Description of Artificial Sequence: Synthetic oligonucleotide
caccaaggaggcaggauuctt

SEQ ID NO: 934 - DNA, 21 bp, Artificial Sequence
  Description of Combined DNA/RNA Molecule: Synthetic oligonucleotide
  Description of Artificial Sequence: Synthetic oligonucleotide
gaauccugccuccuuggugtt

SEQ ID NO: 935 - DNA, 21 bp, Artificial Sequence
  Description of Combined DNA/RNA Molecule: Synthetic oligonucleotide
  Description of Artificial Sequence: Synthetic oligonucleotide
ggccuggaguuuauucggatt

SEQ ID NO: 936 - DNA, 21 bp, Artificial Sequence
  Description of Combined DNA/RNA Molecule: Synthetic oligonucleotide
  Description of Artificial Sequence: Synthetic oligonucleotide
uccgaauaaacuccaggcctt

SEQ ID NO: 937 - DNA, 21 bp, Artificial Sequence
  Description of Combined DNA/RNA Molecule: Synthetic oligonucleotide
  Description of Artificial Sequence: Synthetic oligonucleotide
ggccuggaguuuauucggatt

SEQ ID NO: 938 - DNA, 21 bp, Artificial Sequence
  Description of Combined DNA/RNA Molecule: Synthetic oligonucleotide
  Description of Artificial Sequence: Synthetic oligonucleotide
uccgaauaaacuccaggcctt

SEQ ID NO: 939 - DNA, 21 bp, Artificial Sequence
  Description of Combined DNA/RNA Molecule: Synthetic oligonucleotide
  Description of Artificial Sequence: Synthetic oligonucleotide
ggccuggaguuuauucggatt

SEQ ID NO: 940 - DNA, 21 bp, Artificial Sequence
  Description of Combined DNA/RNA Molecule: Synthetic oligonucleotide
  Description of Artificial Sequence: Synthetic oligonucleotide
uccgaauaaacuccaggcctt

SEQ ID NO: 941 - DNA, 21 bp, Artificial Sequence
  Description of Combined DNA/RNA Molecule: Synthetic oligonucleotide
  Description of Artificial Sequence: Synthetic oligonucleotide
ggccuggaguuuauucggatt

SEQ ID NO: 942 - DNA, 21 bp, Artificial Sequence
  Description of Combined DNA/RNA Molecule: Synthetic oligonucleotide
  Description of Artificial Sequence: Synthetic oligonucleotide
uccgaauaaacuccaggcctt

SEQ ID NO: 943 - DNA, 21 bp, Artificial Sequence
  Description of Combined DNA/RNA Molecule: Synthetic oligonucleotide
  Description of Artificial Sequence: Synthetic oligonucleotide
ggccuggaguuuauucggatt

SEQ ID NO: 944 - DNA, 21 bp, Artificial Sequence
  Description of Combined DNA/RNA Molecule: Synthetic oligonucleotide
  Description of Artificial Sequence: Synthetic oligonucleotide
uccgaauaaacuccaggcctt

SEQ ID NO: 945 - DNA, 21 bp, Artificial Sequence
  Description of Combined DNA/RNA Molecule: Synthetic oligonucleotide
  Description of Artificial Sequence: Synthetic oligonucleotide
ggccuggaguuuauucggatt

SEQ ID NO: 946 - DNA, 21 bp, Artificial Sequence
  Description of Combined DNA/RNA Molecule: Synthetic oligonucleotide
  Description of Artificial Sequence: Synthetic oligonucleotide
uccgaauaaacuccaggcctt

SEQ ID NO: 947 - DNA, 21 bp, Artificial Sequence
  Description of Combined DNA/RNA Molecule: Synthetic oligonucleotide
  Description of Artificial Sequence: Synthetic oligonucleotide
ggccuggaguuuauucggatt

SEQ ID NO: 948 - DNA, 21 bp, Artificial Sequence
  Description of Combined DNA/RNA Molecule: Synthetic oligonucleotide
  Description of Artificial Sequence: Synthetic oligonucleotide
uccgaauaaacuccaggcctt

SEQ ID NO: 949 - DNA, 21 bp, Artificial Sequence
  Description of Combined DNA/RNA Molecule: Synthetic oligonucleotide
  Description of Artificial Sequence: Synthetic oligonucleotide
gcaggauucuucccauggatt

SEQ ID NO: 950 - DNA, 21 bp, Artificial Sequence
  Description of Combined DNA/RNA Molecule: Synthetic oligonucleotide
  Description of Artificial Sequence: Synthetic oligonucleotide
uccaugggaagaauccugctt

SEQ ID NO: 951 - DNA, 21 bp, Artificial Sequence
  Description of Combined DNA/RNA Molecule: Synthetic oligonucleotide
  Description of Artificial Sequence: Synthetic oligonucleotide
ugcagggacaaacaucguutt

SEQ ID NO: 952 - DNA, 21 bp, Artificial Sequence
  Description of Combined DNA/RNA Molecule: Synthetic oligonucleotide
  Description of Artificial Sequence: Synthetic oligonucleotide
aacgauguuugucccugcatt

SEQ ID NO: 953 - DNA, 21 bp, Artificial Sequence
  Description of Combined DNA/RNA Molecule: Synthetic oligonucleotide
  Description of Artificial Sequence: Synthetic oligonucleotide
gcagggacaaacaucguugtt

SEQ ID NO: 954 - DNA, 21 bp, Artificial Sequence
  Description of Combined DNA/RNA Molecule: Synthetic oligonucleotide
  Description of Artificial Sequence: Synthetic oligonucleotide
caacgauguuugucccugctt

SEQ ID NO: 955 - DNA, 21 bp, Artificial Sequence
  Description of Combined DNA/RNA Molecule: Synthetic oligonucleotide
  Description of Artificial Sequence: Synthetic oligonucleotide
agggacaaacaucguugggtt

SEQ ID NO: 956 - DNA, 21 bp, Artificial Sequence
  Description of Combined DNA/RNA Molecule: Synthetic oligonucleotide
  Description of Artificial Sequence: Synthetic oligonucleotide
cccaacgauguuugucccutt

SEQ ID NO: 957 - DNA, 21 bp, Artificial Sequence
  Description of Combined DNA/RNA Molecule: Synthetic oligonucleotide
  Description of Artificial Sequence: Synthetic oligonucleotide
cccucaucuccagcuaacutt

SEQ ID NO: 958 - DNA, 21 bp, Artificial Sequence
  Description of Combined DNA/RNA Molecule: Synthetic oligonucleotide
  Description of Artificial Sequence: Synthetic oligonucleotide
aguuagcuggagaugagggtt

SEQ ID NO: 959 - DNA, 21 bp, Artificial Sequence
  Description of Combined DNA/RNA Molecule: Synthetic oligonucleotide
  Description of Artificial Sequence: Synthetic oligonucleotide
caucuccagcuaacuguggtt

SEQ ID NO: 960 - DNA, 21 bp, Artificial Sequence
  Description of Combined DNA/RNA Molecule: Synthetic oligonucleotide
  Description of Artificial Sequence: Synthetic oligonucleotide
ccacaguuagcuggagaugtt

SEQ ID NO: 961 - DNA, 21 bp, Artificial Sequence
  Description of Combined DNA/RNA Molecule: Synthetic oligonucleotide
  Description of Artificial Sequence: Synthetic oligonucleotide
gcucccugauuaauggaggtt

SEQ ID NO: 962 - DNA, 21 bp, Artificial Sequence
  Description of Combined DNA/RNA Molecule: Synthetic oligonucleotide
  Description of Artificial Sequence: Synthetic oligonucleotide
ccuccauuaaucagggagctt

SEQ ID NO: 963 - DNA, 21 bp, Artificial Sequence
  Description of Combined DNA/RNA Molecule: Synthetic oligonucleotide
  Description of Artificial Sequence: Synthetic oligonucleotide
cccugauuaauggaggcuutt

SEQ ID NO: 964 - DNA, 21 bp, Artificial Sequence
  Description of Combined DNA/RNA Molecule: Synthetic oligonucleotide
  Description of Artificial Sequence: Synthetic oligonucleotide
aagccuccauuaaucagggtt

SEQ ID NO: 965 - DNA, 21 bp, Artificial Sequence
  Description of Combined DNA/RNA Molecule: Synthetic oligonucleotide
  Description of Artificial Sequence: Synthetic oligonucleotide
ccugauuaauggaggcuuatt

SEQ ID NO: 966 - DNA, 21 bp, Artificial Sequence
  Description of Combined DNA/RNA Molecule: Synthetic oligonucleotide
  Description of Artificial Sequence: Synthetic oligonucleotide
uaagccuccauuaaucaggtt

SEQ ID NO: 967 - DNA, 21 bp, Artificial Sequence
  Description of Combined DNA/RNA Molecule: Synthetic oligonucleotide
  Description of Artificial Sequence: Synthetic oligonucleotide
ugauuaauggaggcuuagctt

SEQ ID NO: 968 - DNA, 21 bp, Artificial Sequence
  Description of Combined DNA/RNA Molecule: Synthetic oligonucleotide
  Description of Artificial Sequence: Synthetic oligonucleotide
gcuaagccuccauuaaucatt

SEQ ID NO: 969 - DNA, 21 bp, Artificial Sequence
  Description of Combined DNA/RNA Molecule: Synthetic oligonucleotide
  Description of Artificial Sequence: Synthetic oligonucleotide
gauuaauggaggcuuagcutt

SEQ ID NO: 970 - DNA, 21 bp, Artificial Sequence
  Description of Combined DNA/RNA Molecule: Synthetic oligonucleotide
  Description of Artificial Sequence: Synthetic oligonucleotide
agcuaagccuccauuaauctt

SEQ ID NO: 971 - DNA, 21 bp, Artificial Sequence
  Description of Combined DNA/RNA Molecule: Synthetic oligonucleotide
  Description of Artificial Sequence: Synthetic oligonucleotide
auuaauggaggcuuagcuutt

SEQ ID NO: 972 - DNA, 21 bp, Artificial Sequence
  Description of Combined DNA/RNA Molecule: Synthetic oligonucleotide
  Description of Artificial Sequence: Synthetic oligonucleotide
aagcuaagccuccauuaautt

SEQ ID NO: 973 - DNA, 21 bp, Artificial Sequence
  Description of Combined DNA/RNA Molecule: Synthetic oligonucleotide
  Description of Artificial Sequence: Synthetic oligonucleotide
uuaauggaggcuuagcuuutt

SEQ ID NO: 974 - DNA, 21 bp, Artificial Sequence
  Description of Combined DNA/RNA Molecule: Synthetic oligonucleotide
  Description of Artificial Sequence: Synthetic oligonucleotide
aaagcuaagccuccauuaatt

SEQ ID NO: 975 - DNA, 21 bp, Artificial Sequence
  Description of Combined DNA/RNA Molecule: Synthetic oligonucleotide
  Description of Artificial Sequence: Synthetic oligonucleotide
uuucuggauggcaucuagctt

SEQ ID NO: 976 - DNA, 21 bp, Artificial Sequence
  Description of Combined DNA/RNA Molecule: Synthetic oligonucleotide
  Description of Artificial Sequence: Synthetic oligonucleotide
gcuagaugccauccagaaatt

SEQ ID NO: 977 - DNA, 21 bp, Artificial Sequence
  Description of Combined DNA/RNA Molecule: Synthetic oligonucleotide
  Description of Artificial Sequence: Synthetic oligonucleotide
uuucuggauggcaucuagctt

SEQ ID NO: 978 - DNA, 21 bp, Artificial Sequence
  Description of Combined DNA/RNA Molecule: Synthetic oligonucleotide
  Description of Artificial Sequence: Synthetic oligonucleotide
gcuagaugccauccagaaatt

SEQ ID NO: 979 - DNA, 21 bp, Artificial Sequence
  Description of Combined DNA/RNA Molecule: Synthetic oligonucleotide
  Description of Artificial Sequence: Synthetic oligonucleotide
uucuggauggcaucuagcctt

SEQ ID NO: 980 - DNA, 21 bp, Artificial Sequence
  Description of Combined DNA/RNA Molecule: Synthetic oligonucleotide
  Description of Artificial Sequence: Synthetic oligonucleotide
ggcuagaugccauccagaatt

SEQ ID NO: 981 - DNA, 21 bp, Artificial Sequence
  Description of Combined DNA/RNA Molecule: Synthetic oligonucleotide
  Description of Artificial Sequence: Synthetic oligonucleotide
uucuggauggcaucuagcctt

SEQ ID NO: 982 - DNA, 21 bp, Artificial Sequence
  Description of Combined DNA/RNA Molecule: Synthetic oligonucleotide
  Description of Artificial Sequence: Synthetic oligonucleotide
ggcuagaugccauccagaatt

SEQ ID NO: 983 - DNA, 21 bp, Artificial Sequence
  Description of Combined DNA/RNA Molecule: Synthetic oligonucleotide
  Description of Artificial Sequence: Synthetic oligonucleotide
ucuggauggcaucuagccatt

SEQ ID NO: 984 - DNA, 21 bp, Artificial Sequence
  Description of Combined DNA/RNA Molecule: Synthetic oligonucleotide
  Description of Artificial Sequence: Synthetic oligonucleotide
uggcuagaugccauccagatt

SEQ ID NO: 985 - DNA, 21 bp, Artificial Sequence
  Description of Combined DNA/RNA Molecule: Synthetic oligonucleotide
  Description of Artificial Sequence: Synthetic oligonucleotide
ucuggauggcaucuagccatt

SEQ ID NO: 986 - DNA, 21 bp, Artificial Sequence
  Description of Combined DNA/RNA Molecule: Synthetic oligonucleotide
  Description of Artificial Sequence: Synthetic oligonucleotide
uggcuagaugccauccagatt

SEQ ID NO: 987 - DNA, 21 bp, Artificial Sequence
  Description of Combined DNA/RNA Molecule: Synthetic oligonucleotide
  Description of Artificial Sequence: Synthetic oligonucleotide
aggcuggagacaggugcgctt

SEQ ID NO: 988 - DNA, 21 bp, Artificial Sequence
  Description of Combined DNA/RNA Molecule: Synthetic oligonucleotide
  Description of Artificial Sequence: Synthetic oligonucleotide
gcgcaccugucuccagccutt

SEQ ID NO: 989 - DNA, 21 bp, Artificial Sequence
  Description of Combined DNA/RNA Molecule: Synthetic oligonucleotide
  Description of Artificial Sequence: Synthetic oligonucleotide
ggcuggagacaggugcgcctt

SEQ ID NO: 990 - DNA, 21 bp, Artificial Sequence
  Description of Combined DNA/RNA Molecule: Synthetic oligonucleotide
  Description of Artificial Sequence: Synthetic oligonucleotide
ggcgcaccugucuccagcctt

SEQ ID NO: 991 - DNA, 21 bp, Artificial Sequence
  Description of Combined DNA/RNA Molecule: Synthetic oligonucleotide
  Description of Artificial Sequence: Synthetic oligonucleotide
gcuggagacaggugcgccctt

SEQ ID NO: 992 - DNA, 21 bp, Artificial Sequence
  Description of Combined DNA/RNA Molecule: Synthetic oligonucleotide
  Description of Artificial Sequence: Synthetic oligonucleotide
gggcgcaccugucuccagctt

SEQ ID NO: 993 - DNA, 21 bp, Artificial Sequence
  Description of Combined DNA/RNA Molecule: Synthetic oligonucleotide
  Description of Artificial Sequence: Synthetic oligonucleotide
uuccugagccaccuuuacutt

SEQ ID NO: 994 - DNA, 21 bp, Artificial Sequence
  Description of Combined DNA/RNA Molecule: Synthetic oligonucleotide
  Description of Artificial Sequence: Synthetic oligonucleotide
aguaaagguggcucaggaatt

SEQ ID NO: 995 - DNA, 21 bp, Artificial Sequence
  Description of Combined DNA/RNA Molecule: Synthetic oligonucleotide
  Description of Artificial Sequence: Synthetic oligonucleotide
uccugagccaccuuuacuctt

SEQ ID NO: 996 - DNA, 21 bp, Artificial Sequence
  Description of Combined DNA/RNA Molecule: Synthetic oligonucleotide
  Description of Artificial Sequence: Synthetic oligonucleotide
gaguaaagguggcucaggatt

SEQ ID NO: 997 - DNA, 21 bp, Artificial Sequence
  Description of Combined DNA/RNA Molecule: Synthetic oligonucleotide
  Description of Artificial Sequence: Synthetic oligonucleotide
ccugagccaccuuuacucutt

SEQ ID NO: 998 - DNA, 21 bp, Artificial Sequence
  Description of Combined DNA/RNA Molecule: Synthetic oligonucleotide
  Description of Artificial Sequence: Synthetic oligonucleotide
agaguaaagguggcucaggtt

SEQ ID NO: 999 - DNA, 21 bp, Artificial Sequence
  Description of Combined DNA/RNA Molecule: Synthetic oligonucleotide
  Description of Artificial Sequence: Synthetic oligonucleotide
ugagccaccuuuacucugctt

SEQ ID NO: 1000 - DNA, 21 bp, Artificial Sequence
  Description of Combined DNA/RNA Molecule: Synthetic oligonucleotide
  Description of Artificial Sequence: Synthetic oligonucleotide
gcagaguaaagguggcucatt

SEQ ID NO: 1001 - DNA, 21 bp, Artificial Sequence
  Description of Combined DNA/RNA Molecule: Synthetic oligonucleotide
  Description of Artificial Sequence: Synthetic oligonucleotide
agccaccuuuacucugcuctt

SEQ ID NO: 1002 - DNA, 21 bp, Artificial Sequence
  Description of Combined DNA/RNA Molecule: Synthetic oligonucleotide
  Description of Artificial Sequence: Synthetic oligonucleotide
gagcagaguaaagguggcutt

SEQ ID NO: 1003 - DNA, 21 bp, Artificial Sequence
  Description of Combined DNA/RNA Molecule: Synthetic oligonucleotide
  Description of Artificial Sequence: Synthetic oligonucleotide
caccuuuacucugcucuautt

SEQ ID NO: 1004 - DNA, 21 bp, Artificial Sequence
  Description of Combined DNA/RNA Molecule: Synthetic oligonucleotide
  Description of Artificial Sequence: Synthetic oligonucleotide
auagagcagaguaaaggugtt

SEQ ID NO: 1005 - DNA, 21 bp, Artificial Sequence
  Description of Combined DNA/RNA Molecule: Synthetic oligonucleotide
  Description of Artificial Sequence: Synthetic oligonucleotide
uacucugcucuaugccaggtt

SEQ ID NO: 1006 - DNA, 21 bp, Artificial Sequence
  Description of Combined DNA/RNA Molecule: Synthetic oligonucleotide
  Description of Artificial Sequence: Synthetic oligonucleotide
ccuggcauagagcagaguatt

SEQ ID NO: 1007 - DNA, 21 bp, Artificial Sequence
  Description of Combined DNA/RNA Molecule: Synthetic oligonucleotide
  Description of Artificial Sequence: Synthetic oligonucleotide
uacucugcucuaugccaggtt

SEQ ID NO: 1008 - DNA, 21 bp, Artificial Sequence
  Description of Combined DNA/RNA Molecule: Synthetic oligonucleotide
  Description of Artificial Sequence: Synthetic oligonucleotide
ccuggcauagagcagaguatt

SEQ ID NO: 1009 - DNA, 21 bp, Artificial Sequence
  Description of Combined DNA/RNA Molecule: Synthetic oligonucleotide
  Description of Artificial Sequence: Synthetic oligonucleotide
augccaggcugugcuagcatt

SEQ ID NO: 1010 - DNA, 21 bp, Artificial Sequence
  Description of Combined DNA/RNA Molecule: Synthetic oligonucleotide
  Description of Artificial Sequence: Synthetic oligonucleotide
ugcuagcacagccuggcautt

SEQ ID NO: 1011 - DNA, 21 bp, Artificial Sequence
  Description of Combined DNA/RNA Molecule: Synthetic oligonucleotide
  Description of Artificial Sequence: Synthetic oligonucleotide
aggcugugcuagcaacacctt

SEQ ID NO: 1012 - DNA, 21 bp, Artificial Sequence
  Description of Combined DNA/RNA Molecule: Synthetic oligonucleotide
  Description of Artificial Sequence: Synthetic oligonucleotide
gguguugcuagcacagccutt

SEQ ID NO: 1013 - DNA, 21 bp, Artificial Sequence
  Description of Combined DNA/RNA Molecule: Synthetic oligonucleotide
  Description of Artificial Sequence: Synthetic oligonucleotide
cugugcuagcaacacccaatt

SEQ ID NO: 1014 - DNA, 21 bp, Artificial Sequence
  Description of Combined DNA/RNA Molecule: Synthetic oligonucleotide
  Description of Artificial Sequence: Synthetic oligonucleotide
uuggguguugcuagcacagtt

SEQ ID NO: 1015 - DNA, 21 bp, Artificial Sequence
  Description of Combined DNA/RNA Molecule: Synthetic oligonucleotide
  Description of Artificial Sequence: Synthetic oligonucleotide
gcuagcaacacccaaaggutt

SEQ ID NO: 1016 - DNA, 21 bp, Artificial Sequence
  Description of Combined DNA/RNA Molecule: Synthetic oligonucleotide
  Description of Artificial Sequence: Synthetic oligonucleotide
accuuuggguguugcuagctt

SEQ ID NO: 1017 - DNA, 21 bp, Artificial Sequence
  Description of Combined DNA/RNA Molecule: Synthetic oligonucleotide
  Description of Artificial Sequence: Synthetic oligonucleotide
ggagccaucaccuaggacutt

SEQ ID NO: 1018 - DNA, 21 bp, Artificial Sequence
  Description of Combined DNA/RNA Molecule: Synthetic oligonucleotide
  Description of Artificial Sequence: Synthetic oligonucleotide
aguccuaggugauggcucctt

SEQ ID NO: 1019 - DNA, 21 bp, Artificial Sequence
  Description of Combined DNA/RNA Molecule: Synthetic oligonucleotide
  Description of Artificial Sequence: Synthetic oligonucleotide
caccuaggacugacucggctt

SEQ ID NO: 1020 - DNA, 21 bp, Artificial Sequence
  Description of Combined DNA/RNA Molecule: Synthetic oligonucleotide
  Description of Artificial Sequence: Synthetic oligonucleotide
gccgagucaguccuaggugtt

SEQ ID NO: 1021 - DNA, 21 bp, Artificial Sequence
  Description of Combined DNA/RNA Molecule: Synthetic oligonucleotide
  Description of Artificial Sequence: Synthetic oligonucleotide
aggacugacucggcagugutt

SEQ ID NO: 1022 - DNA, 21 bp, Artificial Sequence
  Description of Combined DNA/RNA Molecule: Synthetic oligonucleotide
  Description of Artificial Sequence: Synthetic oligonucleotide
acacugccgagucaguccutt

SEQ ID NO: 1023 - DNA, 21 bp, Artificial Sequence
  Description of Combined DNA/RNA Molecule: Synthetic oligonucleotide
  Description of Artificial Sequence: Synthetic oligonucleotide
ggacugacucggcagugugtt

SEQ ID NO: 1024 - DNA, 21 bp, Artificial Sequence
  Description of Combined DNA/RNA Molecule: Synthetic oligonucleotide
  Description of Artificial Sequence: Synthetic oligonucleotide
cacacugccgagucagucctt

SEQ ID NO: 1025 - DNA, 21 bp, Artificial Sequence
  Description of Combined DNA/RNA Molecule: Synthetic oligonucleotide
  Description of Artificial Sequence: Synthetic oligonucleotide
uggugcaugcacugucucatt

SEQ ID NO: 1026 - DNA, 21 bp, Artificial Sequence
  Description of Combined DNA/RNA Molecule: Synthetic oligonucleotide
  Description of Artificial Sequence: Synthetic oligonucleotide
ugagacagugcaugcaccatt

SEQ ID NO: 1027 - DNA, 21 bp, Artificial Sequence
  Description of Combined DNA/RNA Molecule: Synthetic oligonucleotide
  Description of Artificial Sequence: Synthetic oligonucleotide
augcacugucucagccaactt

SEQ ID NO: 1028 - DNA, 21 bp, Artificial Sequence
  Description of Combined DNA/RNA Molecule: Synthetic oligonucleotide
  Description of Artificial Sequence: Synthetic oligonucleotide
guuggcugagacagugcautt

SEQ ID NO: 1029 - DNA, 21 bp, Artificial Sequence
  Description of Combined DNA/RNA Molecule: Synthetic oligonucleotide
  Description of Artificial Sequence: Synthetic oligonucleotide
cugucucagccaacccgcutt

SEQ ID NO: 1030 - DNA, 21 bp, Artificial Sequence
  Description of Combined DNA/RNA Molecule: Synthetic oligonucleotide
  Description of Artificial Sequence: Synthetic oligonucleotide
agcggguuggcugagacagtt

SEQ ID NO: 1031 - DNA, 21 bp, Artificial Sequence
  Description of Combined DNA/RNA Molecule: Synthetic oligonucleotide
  Description of Artificial Sequence: Synthetic oligonucleotide
cucagccaacccgcuccactt

SEQ ID NO: 1032 - DNA, 21 bp, Artificial Sequence
  Description of Combined DNA/RNA Molecule: Synthetic oligonucleotide
  Description of Artificial Sequence: Synthetic oligonucleotide
guggagcggguuggcugagtt

SEQ ID NO: 1033 - DNA, 21 bp, Artificial Sequence
  Description of Combined DNA/RNA Molecule: Synthetic oligonucleotide
  Description of Artificial Sequence: Synthetic oligonucleotide
cucagccaacccgcuccactt

SEQ ID NO: 1034 - DNA, 21 bp, Artificial Sequence
  Description of Combined DNA/RNA Molecule: Synthetic oligonucleotide
  Description of Artificial Sequence: Synthetic oligonucleotide
guggagcggguuggcugagtt

SEQ ID NO: 1035 - DNA, 21 bp, Artificial Sequence
  Description of Combined DNA/RNA Molecule: Synthetic oligonucleotide
  Description of Artificial Sequence: Synthetic oligonucleotide
gccaacccgcuccacuacctt

SEQ ID NO: 1036 - DNA, 21 bp, Artificial Sequence
  Description of Combined DNA/RNA Molecule: Synthetic oligonucleotide
  Description of Artificial Sequence: Synthetic oligonucleotide
gguaguggagcggguuggctt

SEQ ID NO: 1037 - DNA, 21 bp, Artificial Sequence
  Description of Combined DNA/RNA Molecule: Synthetic oligonucleotide
  Description of Artificial Sequence: Synthetic oligonucleotide
gccaacccgcuccacuacctt

SEQ ID NO: 1038 - DNA, 21 bp, Artificial Sequence
  Description of Combined DNA/RNA Molecule: Synthetic oligonucleotide
  Description of Artificial Sequence: Synthetic oligonucleotide
gguaguggagcggguuggctt

SEQ ID NO: 1039 - DNA, 21 bp, Artificial Sequence
  Description of Combined DNA/RNA Molecule: Synthetic oligonucleotide
  Description of Artificial Sequence: Synthetic oligonucleotide
aacccgcuccacuacccggtt

SEQ ID NO: 1040 - DNA, 21 bp, Artificial Sequence
  Description of Combined DNA/RNA Molecule: Synthetic oligonucleotide
  Description of Artificial Sequence: Synthetic oligonucleotide
ccggguaguggagcggguutt

SEQ ID NO: 1041 - DNA, 21 bp, Artificial Sequence
  Description of Combined DNA/RNA Molecule: Synthetic oligonucleotide
  Description of Artificial Sequence: Synthetic oligonucleotide
ccgcuccacuacccggcagtt

SEQ ID NO: 1042 - DNA, 21 bp, Artificial Sequence
  Description of Combined DNA/RNA Molecule: Synthetic oligonucleotide
  Description of Artificial Sequence: Synthetic oligonucleotide
cugccggguaguggagcggtt

SEQ ID NO: 1043 - DNA, 21 bp, Artificial Sequence
  Description of Combined DNA/RNA Molecule: Synthetic oligonucleotide
  Description of Artificial Sequence: Synthetic oligonucleotide
cuacccggcaggguacacatt

SEQ ID NO: 1044 - DNA, 21 bp, Artificial Sequence
  Description of Combined DNA/RNA Molecule: Synthetic oligonucleotide
  Description of Artificial Sequence: Synthetic oligonucleotide
uguguacccugccggguagtt

SEQ ID NO: 1045 - DNA, 21 bp, Artificial Sequence
  Description of Combined DNA/RNA Molecule: Synthetic oligonucleotide
  Description of Artificial Sequence: Synthetic oligonucleotide
uacccggcaggguacacautt

SEQ ID NO: 1046 - DNA, 21 bp, Artificial Sequence
  Description of Combined DNA/RNA Molecule: Synthetic oligonucleotide
  Description of Artificial Sequence: Synthetic oligonucleotide
auguguacccugccggguatt

SEQ ID NO: 1047 - DNA, 21 bp, Artificial Sequence
  Description of Combined DNA/RNA Molecule: Synthetic oligonucleotide
  Description of Artificial Sequence: Synthetic oligonucleotide
acccggcaggguacacauutt

SEQ ID NO: 1048 - DNA, 21 bp, Artificial Sequence
  Description of Combined DNA/RNA Molecule: Synthetic oligonucleotide
  Description of Artificial Sequence: Synthetic oligonucleotide
aauguguacccugccgggutt

SEQ ID NO: 1049 - DNA, 21 bp, Artificial Sequence
  Description of Combined DNA/RNA Molecule: Synthetic oligonucleotide
  Description of Artificial Sequence: Synthetic oligonucleotide
cccggcaggguacacauuctt

SEQ ID NO: 1050 - DNA, 21 bp, Artificial Sequence
  Description of Combined DNA/RNA Molecule: Synthetic oligonucleotide
  Description of Artificial Sequence: Synthetic oligonucleotide
gaauguguacccugccgggtt

SEQ ID NO: 1051 - DNA, 21 bp, Artificial Sequence
  Description of Combined DNA/RNA Molecule: Synthetic oligonucleotide
  Description of Artificial Sequence: Synthetic oligonucleotide
cggcaggguacacauucgctt

SEQ ID NO: 1052 - DNA, 21 bp, Artificial Sequence
  Description of Combined DNA/RNA Molecule: Synthetic oligonucleotide
  Description of Artificial Sequence: Synthetic oligonucleotide
gcgaauguguacccugccgtt

SEQ ID NO: 1053 - DNA, 21 bp, Artificial Sequence
  Description of Combined DNA/RNA Molecule: Synthetic oligonucleotide
  Description of Artificial Sequence: Synthetic oligonucleotide
gcaggguacacauucgcactt

SEQ ID NO: 1054 - DNA, 21 bp, Artificial Sequence
  Description of Combined DNA/RNA Molecule: Synthetic oligonucleotide
  Description of Artificial Sequence: Synthetic oligonucleotide
gugcgaauguguacccugctt

SEQ ID NO: 1055 - DNA, 21 bp, Artificial Sequence
  Description of Combined DNA/RNA Molecule: Synthetic oligonucleotide
  Description of Artificial Sequence: Synthetic oligonucleotide
caggguacacauucgcacctt

SEQ ID NO: 1056 - DNA, 21 bp, Artificial Sequence
  Description of Combined DNA/RNA Molecule: Synthetic oligonucleotide
  Description of Artificial Sequence: Synthetic oligonucleotide
ggugcgaauguguacccugtt

SEQ ID NO: 1057 - DNA, 21 bp, Artificial Sequence
  Description of Combined DNA/RNA Molecule: Synthetic oligonucleotide
  Description of Artificial Sequence: Synthetic oligonucleotide
aggguacacauucgcaccctt

SEQ ID NO: 1058 - DNA, 21 bp, Artificial Sequence
  Description of Combined DNA/RNA Molecule: Synthetic oligonucleotide
  Description of Artificial Sequence: Synthetic oligonucleotide
gggugcgaauguguacccutt

SEQ ID NO: 1059 - DNA, 21 bp, Artificial Sequence
  Description of Combined DNA/RNA Molecule: Synthetic oligonucleotide
  Description of Artificial Sequence: Synthetic oligonucleotide
ggaacugagccagaaacgctt

SEQ ID NO: 1060 - DNA, 21 bp, Artificial Sequence
  Description of Combined DNA/RNA Molecule: Synthetic oligonucleotide
  Description of Artificial Sequence: Synthetic oligonucleotide
gcguuucuggcucaguucctt

SEQ ID NO: 1061 - DNA, 21 bp, Artificial Sequence
  Description of Combined DNA/RNA Molecule: Synthetic oligonucleotide
  Description of Artificial Sequence: Synthetic oligonucleotide
gaacugagccagaaacgcatt

SEQ ID NO: 1062 - DNA, 21 bp, Artificial Sequence
  Description of Combined DNA/RNA Molecule: Synthetic oligonucleotide
  Description of Artificial Sequence: Synthetic oligonucleotide
ugcguuucuggcucaguuctt

SEQ ID NO: 1063 - DNA, 21 bp, Artificial Sequence
  Description of Combined DNA/RNA Molecule: Synthetic oligonucleotide
  Description of Artificial Sequence: Synthetic oligonucleotide
aacugagccagaaacgcagtt

SEQ ID NO: 1064 - DNA, 21 bp, Artificial Sequence
  Description of Combined DNA/RNA Molecule: Synthetic oligonucleotide
  Description of Artificial Sequence: Synthetic oligonucleotide
cugcguuucuggcucaguutt

SEQ ID NO: 1065 - DNA, 21 bp, Artificial Sequence
  Description of Combined DNA/RNA Molecule: Synthetic oligonucleotide
  Description of Artificial Sequence: Synthetic oligonucleotide
ugagccagaaacgcagauutt

SEQ ID NO: 1066 - DNA, 21 bp, Artificial Sequence
  Description of Combined DNA/RNA Molecule: Synthetic oligonucleotide
  Description of Artificial Sequence: Synthetic oligonucleotide
aaucugcguuucuggcucatt

SEQ ID NO: 1067 - DNA, 21 bp, Artificial Sequence
  Description of Combined DNA/RNA Molecule: Synthetic oligonucleotide
  Description of Artificial Sequence: Synthetic oligonucleotide
agaaacgcagauugggcugtt

SEQ ID NO: 1068 - DNA, 21 bp, Artificial Sequence
  Description of Combined DNA/RNA Molecule: Synthetic oligonucleotide
  Description of Artificial Sequence: Synthetic oligonucleotide
cagcccaaucugcguuucutt

SEQ ID NO: 1069 - DNA, 21 bp, Artificial Sequence
  Description of Combined DNA/RNA Molecule: Synthetic oligonucleotide
  Description of Artificial Sequence: Synthetic oligonucleotide
aacgcagauugggcuggcutt

SEQ ID NO: 1070 - DNA, 21 bp, Artificial Sequence
  Description of Combined DNA/RNA Molecule: Synthetic oligonucleotide
  Description of Artificial Sequence: Synthetic oligonucleotide
agccagcccaaucugcguutt

SEQ ID NO: 1071 - DNA, 21 bp, Artificial Sequence
  Description of Combined DNA/RNA Molecule: Synthetic oligonucleotide
  Description of Artificial Sequence: Synthetic oligonucleotide
agccaagccucuucuuacutt

SEQ ID NO: 1072 - DNA, 21 bp, Artificial Sequence
  Description of Combined DNA/RNA Molecule: Synthetic oligonucleotide
  Description of Artificial Sequence: Synthetic oligonucleotide
aguaagaagaggcuuggcutt

SEQ ID NO: 1073 - DNA, 21 bp, Artificial Sequence
  Description of Combined DNA/RNA Molecule: Synthetic oligonucleotide
  Description of Artificial Sequence: Synthetic oligonucleotide
agccaagccucuucuuacutt

SEQ ID NO: 1074 - DNA, 21 bp, Artificial Sequence
  Description of Combined DNA/RNA Molecule: Synthetic oligonucleotide
  Description of Artificial Sequence: Synthetic oligonucleotide
aguaagaagaggcuuggcutt

SEQ ID NO: 1075 - DNA, 21 bp, Artificial Sequence
  Description of Combined DNA/RNA Molecule: Synthetic oligonucleotide
  Description of Artificial Sequence: Synthetic oligonucleotide
agccaagccucuucuuacutt

SEQ ID NO: 1076 - DNA, 21 bp, Artificial Sequence
  Description of Combined DNA/RNA Molecule: Synthetic oligonucleotide
  Description of Artificial Sequence: Synthetic oligonucleotide
aguaagaagaggcuuggcutt

SEQ ID NO: 1077 - DNA, 21 bp, Artificial Sequence
  Description of Combined DNA/RNA Molecule: Synthetic oligonucleotide
  Description of Artificial Sequence: Synthetic oligonucleotide
agccaagccucuucuuacutt

SEQ ID NO: 1078 - DNA, 21 bp, Artificial Sequence
  Description of Combined DNA/RNA Molecule: Synthetic oligonucleotide
  Description of Artificial Sequence: Synthetic oligonucleotide
aguaagaagaggcuuggcutt

SEQ ID NO: 1079 - DNA, 21 bp, Artificial Sequence
  Description of Combined DNA/RNA Molecule: Synthetic oligonucleotide
  Description of Artificial Sequence: Synthetic oligonucleotide
agccaagccucuucuuacutt

SEQ ID NO: 1080 - DNA, 21 bp, Artificial Sequence
  Description of Combined DNA/RNA Molecule: Synthetic oligonucleotide
  Description of Artificial Sequence: Synthetic oligonucleotide
aguaagaagaggcuuggcutt

SEQ ID NO: 1081 - DNA, 21 bp, Artificial Sequence
  Description of Combined DNA/RNA Molecule: Synthetic oligonucleotide
  Description of Artificial Sequence: Synthetic oligonucleotide
agccaagccucuucuuacutt

SEQ ID NO: 1082 - DNA, 21 bp, Artificial Sequence
  Description of Combined DNA/RNA Molecule: Synthetic oligonucleotide
  Description of Artificial Sequence: Synthetic oligonucleotide
aguaagaagaggcuuggcutt

SEQ ID NO: 1083 - DNA, 21 bp, Artificial Sequence
  Description of Combined DNA/RNA Molecule: Synthetic oligonucleotide
  Description of Artificial Sequence: Synthetic oligonucleotide
agccaagccucuucuuacutt

SEQ ID NO: 1084 - DNA, 21 bp, Artificial Sequence
  Description of Combined DNA/RNA Molecule: Synthetic oligonucleotide
  Description of Artificial Sequence: Synthetic oligonucleotide
aguaagaagaggcuuggcutt

SEQ ID NO: 1085 - DNA, 21 bp, Artificial Sequence
  Description of Combined DNA/RNA Molecule: Synthetic oligonucleotide
  Description of Artificial Sequence: Synthetic oligonucleotide
agccaagccucuucuuacutt

SEQ ID NO: 1086 - DNA, 21 bp, Artificial Sequence
  Description of Combined DNA/RNA Molecule: Synthetic oligonucleotide
  Description of Artificial Sequence: Synthetic oligonucleotide
aguaagaagaggcuuggcutt

SEQ ID NO: 1087 - DNA, 21 bp, Artificial Sequence
  Description of Combined DNA/RNA Molecule: Synthetic oligonucleotide
  Description of Artificial Sequence: Synthetic oligonucleotide
agccaagccucuucuuacutt

SEQ ID NO: 1088 - DNA, 21 bp, Artificial Sequence
  Description of Combined DNA/RNA Molecule: Synthetic oligonucleotide
  Description of Artificial Sequence: Synthetic oligonucleotide
aguaagaagaggcuuggcutt

SEQ ID NO: 1089 - DNA, 21 bp, Artificial Sequence
  Description of Combined DNA/RNA Molecule: Synthetic oligonucleotide
  Description of Artificial Sequence: Synthetic oligonucleotide
ugguucccugaggaccagctt

SEQ ID NO: 1090 - DNA, 21 bp, Artificial Sequence
  Description of Combined DNA/RNA Molecule: Synthetic oligonucleotide
  Description of Artificial Sequence: Synthetic oligonucleotide
gcugguccucagggaaccatt

SEQ ID NO: 1091 - DNA, 21 bp, Artificial Sequence
  Description of Combined DNA/RNA Molecule: Synthetic oligonucleotide
  Description of Artificial Sequence: Synthetic oligonucleotide
ugguucccugaggaccagctt

SEQ ID NO: 1092 - DNA, 21 bp, Artificial Sequence
  Description of Combined DNA/RNA Molecule: Synthetic oligonucleotide
  Description of Artificial Sequence: Synthetic oligonucleotide
gcugguccucagggaaccatt

SEQ ID NO: 1093 - DNA, 21 bp, Artificial Sequence
  Description of Combined DNA/RNA Molecule: Synthetic oligonucleotide
  Description of Artificial Sequence: Synthetic oligonucleotide
ugguucccugaggaccagctt

SEQ ID NO: 1094 - DNA, 21 bp, Artificial Sequence
  Description of Combined DNA/RNA Molecule: Synthetic oligonucleotide
  Description of Artificial Sequence: Synthetic oligonucleotide
gcugguccucagggaaccatt

SEQ ID NO: 1095 - DNA, 21 bp, Artificial Sequence
  Description of Combined DNA/RNA Molecule: Synthetic oligonucleotide
  Description of Artificial Sequence: Synthetic oligonucleotide
ugguucccugaggaccagctt

SEQ ID NO: 1096 - DNA, 21 bp, Artificial Sequence
  Description of Combined DNA/RNA Molecule: Synthetic oligonucleotide
  Description of Artificial Sequence: Synthetic oligonucleotide
gcugguccucagggaaccatt

SEQ ID NO: 1097 - DNA, 21 bp, Artificial Sequence
  Description of Combined DNA/RNA Molecule: Synthetic oligonucleotide
  Description of Artificial Sequence: Synthetic oligonucleotide
ugguucccugaggaccagctt

SEQ ID NO: 1098 - DNA, 21 bp, Artificial Sequence
  Description of Combined DNA/RNA Molecule: Synthetic oligonucleotide
  Description of Artificial Sequence: Synthetic oligonucleotide
gcugguccucagggaaccatt

SEQ ID NO: 1099 - DNA, 21 bp, Artificial Sequence
  Description of Combined DNA/RNA Molecule: Synthetic oligonucleotide
  Description of Artificial Sequence: Synthetic oligonucleotide
ugguucccugaggaccagctt

SEQ ID NO: 1100 - DNA, 21 bp, Artificial Sequence
  Description of Combined DNA/RNA Molecule: Synthetic oligonucleotide
  Description of Artificial Sequence: Synthetic oligonucleotide
gcugguccucagggaaccatt

SEQ ID NO: 1101 - DNA, 21 bp, Artificial Sequence
  Description of Combined DNA/RNA Molecule: Synthetic oligonucleotide
  Description of Artificial Sequence: Synthetic oligonucleotide
ugguucccugaggaccagctt

SEQ ID NO: 1102 - DNA, 21 bp, Artificial Sequence
  Description of Combined DNA/RNA Molecule: Synthetic oligonucleotide
  Description of Artificial Sequence: Synthetic oligonucleotide
gcugguccucagggaaccatt

SEQ ID NO: 1103 - DNA, 21 bp, Artificial Sequence
  Description of Combined DNA/RNA Molecule: Synthetic oligonucleotide
  Description of Artificial Sequence: Synthetic oligonucleotide
ucuucuuacuucacccggctt

SEQ ID NO: 1104 - DNA, 21 bp, Artificial Sequence
  Description of Combined DNA/RNA Molecule: Synthetic oligonucleotide
  Description of Artificial Sequence: Synthetic oligonucleotide
gccgggugaaguaagaagatt

SEQ ID NO: 1105 - DNA, 21 bp, Artificial Sequence
  Description of Combined DNA/RNA Molecule: Synthetic oligonucleotide
  Description of Artificial Sequence: Synthetic oligonucleotide
cuucuuacuucacccggcutt

SEQ ID NO: 1106 - DNA, 21 bp, Artificial Sequence
  Description of Combined DNA/RNA Molecule: Synthetic oligonucleotide
  Description of Artificial Sequence: Synthetic oligonucleotide
agccgggugaaguaagaagtt

SEQ ID NO: 1107 - DNA, 21 bp, Artificial Sequence
  Description of Combined DNA/RNA Molecule: Synthetic oligonucleotide
  Description of Artificial Sequence: Synthetic oligonucleotide
uucuuacuucacccggcugtt

SEQ ID NO: 1108 - DNA, 21 bp, Artificial Sequence
  Description of Combined DNA/RNA Molecule: Synthetic oligonucleotide
  Description of Artificial Sequence: Synthetic oligonucleotide
cagccgggugaaguaagaatt

SEQ ID NO: 1109 - DNA, 21 bp, Artificial Sequence
  Description of Combined DNA/RNA Molecule: Synthetic oligonucleotide
  Description of Artificial Sequence: Synthetic oligonucleotide
gggcuccucauuuuuacggtt

SEQ ID NO: 1110 - DNA, 21 bp, Artificial Sequence
  Description of Combined DNA/RNA Molecule: Synthetic oligonucleotide
  Description of Artificial Sequence: Synthetic oligonucleotide
ccguaaaaaugaggagccctt

SEQ ID NO: 1111 - DNA, 21 bp, Artificial Sequence
  Description of Combined DNA/RNA Molecule: Synthetic oligonucleotide
  Description of Artificial Sequence: Synthetic oligonucleotide
ggcuccucauuuuuacgggtt

SEQ ID NO: 1112 - DNA, 21 bp, Artificial Sequence
  Description of Combined DNA/RNA Molecule: Synthetic oligonucleotide
  Description of Artificial Sequence: Synthetic oligonucleotide
cccguaaaaaugaggagcctt

SEQ ID NO: 1113 - DNA, 21 bp, Artificial Sequence
  Description of Combined DNA/RNA Molecule: Synthetic oligonucleotide
  Description of Artificial Sequence: Synthetic oligonucleotide
gcuccucauuuuuacgggutt

SEQ ID NO: 1114 - DNA, 21 bp, Artificial Sequence
  Description of Combined DNA/RNA Molecule: Synthetic oligonucleotide
  Description of Artificial Sequence: Synthetic oligonucleotide
acccguaaaaaugaggagctt

SEQ ID NO: 1115 - DNA, 21 bp, Artificial Sequence
  Description of Combined DNA/RNA Molecule: Synthetic oligonucleotide
  Description of Artificial Sequence: Synthetic oligonucleotide
cuccucauuuuuacggguatt

SEQ ID NO: 1116 - DNA, 21 bp, Artificial Sequence
  Description of Combined DNA/RNA Molecule: Synthetic oligonucleotide
  Description of Artificial Sequence: Synthetic oligonucleotide
uacccguaaaaaugaggagtt

SEQ ID NO: 1117 - DNA, 21 bp, Artificial Sequence
  Description of Combined DNA/RNA Molecule: Synthetic oligonucleotide
  Description of Artificial Sequence: Synthetic oligonucleotide
uccucauuuuuacggguaatt

SEQ ID NO: 1118 - DNA, 21 bp, Artificial Sequence
  Description of Combined DNA/RNA Molecule: Synthetic oligonucleotide
  Description of Artificial Sequence: Synthetic oligonucleotide
uuacccguaaaaaugaggatt

SEQ ID NO: 1119 - DNA, 21 bp, Artificial Sequence
  Description of Combined DNA/RNA Molecule: Synthetic oligonucleotide
  Description of Artificial Sequence: Synthetic oligonucleotide
ccucauuuuuacggguaactt

SEQ ID NO: 1120 - DNA, 21 bp, Artificial Sequence
  Description of Combined DNA/RNA Molecule: Synthetic oligonucleotide
  Description of Artificial Sequence: Synthetic oligonucleotide
guuacccguaaaaaugaggtt

SEQ ID NO: 1121 - DNA, 21 bp, Artificial Sequence
  Description of Combined DNA/RNA Molecule: Synthetic oligonucleotide
  Description of Artificial Sequence: Synthetic oligonucleotide
cucauuuuuacggguaacatt

SEQ ID NO: 1122 - DNA, 21 bp, Artificial Sequence
  Description of Combined DNA/RNA Molecule: Synthetic oligonucleotide
  Description of Artificial Sequence: Synthetic oligonucleotide
uguuacccguaaaaaugagtt

SEQ ID NO: 1123 - DNA, 21 bp, Artificial Sequence
  Description of Combined DNA/RNA Molecule: Synthetic oligonucleotide
  Description of Artificial Sequence: Synthetic oligonucleotide
cauuuuuacggguaacagutt

SEQ ID NO: 1124 - DNA, 21 bp, Artificial Sequence
  Description of Combined DNA/RNA Molecule: Synthetic oligonucleotide
  Description of Artificial Sequence: Synthetic oligonucleotide
acuguuacccguaaaaaugtt

SEQ ID NO: 1125 - DNA, 21 bp, Artificial Sequence
  Description of Combined DNA/RNA Molecule: Synthetic oligonucleotide
  Description of Artificial Sequence: Synthetic oligonucleotide
auuuuuacggguaacagugtt

SEQ ID NO: 1126 - DNA, 21 bp, Artificial Sequence
  Description of Combined DNA/RNA Molecule: Synthetic oligonucleotide
  Description of Artificial Sequence: Synthetic oligonucleotide
cacuguuacccguaaaaautt

SEQ ID NO: 1127 - DNA, 21 bp, Artificial Sequence
  Description of Combined DNA/RNA Molecule: Synthetic oligonucleotide
  Description of Artificial Sequence: Synthetic oligonucleotide
uuuacggguaacagugaggtt

SEQ ID NO: 1128 - DNA, 21 bp, Artificial Sequence
  Description of Combined DNA/RNA Molecule: Synthetic oligonucleotide
  Description of Artificial Sequence: Synthetic oligonucleotide
ccucacuguuacccguaaatt

SEQ ID NO: 1129 - DNA, 21 bp, Artificial Sequence
  Description of Combined DNA/RNA Molecule: Synthetic oligonucleotide
  Description of Artificial Sequence: Synthetic oligonucleotide
cagaccaggaagcucggugtt

SEQ ID NO: 1130 - DNA, 21 bp, Artificial Sequence
  Description of Combined DNA/RNA Molecule: Synthetic oligonucleotide
  Description of Artificial Sequence: Synthetic oligonucleotide
caccgagcuuccuggucugtt

SEQ ID NO: 1131 - DNA, 21 bp, Artificial Sequence
  Description of Combined DNA/RNA Molecule: Synthetic oligonucleotide
  Description of Artificial Sequence: Synthetic oligonucleotide
gaccaggaagcucggugagtt

SEQ ID NO: 1132 - DNA, 21 bp, Artificial Sequence
  Description of Combined DNA/RNA Molecule: Synthetic oligonucleotide
  Description of Artificial Sequence: Synthetic oligonucleotide
cucaccgagcuuccugguctt

SEQ ID NO: 1133 - DNA, 21 bp, Artificial Sequence
  Description of Combined DNA/RNA Molecule: Synthetic oligonucleotide
  Description of Artificial Sequence: Synthetic oligonucleotide
ccaggaagcucggugagugtt

SEQ ID NO: 1134 - DNA, 21 bp, Artificial Sequence
  Description of Combined DNA/RNA Molecule: Synthetic oligonucleotide
  Description of Artificial Sequence: Synthetic oligonucleotide
cacucaccgagcuuccuggtt

SEQ ID NO: 1135 - DNA, 21 bp, Artificial Sequence
  Description of Combined DNA/RNA Molecule: Synthetic oligonucleotide
  Description of Artificial Sequence: Synthetic oligonucleotide
ggaagcucggugagugaugtt

SEQ ID NO: 1136 - DNA, 21 bp, Artificial Sequence
  Description of Combined DNA/RNA Molecule: Synthetic oligonucleotide
  Description of Artificial Sequence: Synthetic oligonucleotide
caucacucaccgagcuucctt

SEQ ID NO: 1137 - DNA, 21 bp, Artificial Sequence
  Description of Combined DNA/RNA Molecule: Synthetic oligonucleotide
  Description of Artificial Sequence: Synthetic oligonucleotide
gugagugauggcagaacgatt

SEQ ID NO: 1138 - DNA, 21 bp, Artificial Sequence
  Description of Combined DNA/RNA Molecule: Synthetic oligonucleotide
  Description of Artificial Sequence: Synthetic oligonucleotide
ucguucugccaucacucactt

SEQ ID NO: 1139 - DNA, 21 bp, Artificial Sequence
  Description of Combined DNA/RNA Molecule: Synthetic oligonucleotide
  Description of Artificial Sequence: Synthetic oligonucleotide
gagugauggcagaacgaugtt

SEQ ID NO: 1140 - DNA, 21 bp, Artificial Sequence
  Description of Combined DNA/RNA Molecule: Synthetic oligonucleotide
  Description of Artificial Sequence: Synthetic oligonucleotide
caucguucugccaucacuctt

SEQ ID NO: 1141 - DNA, 21 bp, Artificial Sequence
  Description of Combined DNA/RNA Molecule: Synthetic oligonucleotide
  Description of Artificial Sequence: Synthetic oligonucleotide
gauggcagaacgaugccugtt

SEQ ID NO: 1142 - DNA, 21 bp, Artificial Sequence
  Description of Combined DNA/RNA Molecule: Synthetic oligonucleotide
  Description of Artificial Sequence: Synthetic oligonucleotide
caggcaucguucugccauctt

SEQ ID NO: 1143 - DNA, 21 bp, Artificial Sequence
  Description of Combined DNA/RNA Molecule: Synthetic oligonucleotide
  Description of Artificial Sequence: Synthetic oligonucleotide
agaacgaugccugcaggcatt

SEQ ID NO: 1144 - DNA, 21 bp, Artificial Sequence
  Description of Combined DNA/RNA Molecule: Synthetic oligonucleotide
  Description of Artificial Sequence: Synthetic oligonucleotide
ugccugcaggcaucguucutt

SEQ ID NO: 1145 - DNA, 21 bp, Artificial Sequence
  Description of Combined DNA/RNA Molecule: Synthetic oligonucleotide
  Description of Artificial Sequence: Synthetic oligonucleotide
acgaugccugcaggcauggtt

SEQ ID NO: 1146 - DNA, 21 bp, Artificial Sequence
  Description of Combined DNA/RNA Molecule: Synthetic oligonucleotide
  Description of Artificial Sequence: Synthetic oligonucleotide
ccaugccugcaggcaucgutt

SEQ ID NO: 1147 - DNA, 21 bp, Artificial Sequence
  Description of Combined DNA/RNA Molecule: Synthetic oligonucleotide
  Description of Artificial Sequence: Synthetic oligonucleotide
gcaggcauggaacuuuuuctt

SEQ ID NO: 1148 - DNA, 21 bp, Artificial Sequence
  Description of Combined DNA/RNA Molecule: Synthetic oligonucleotide
  Description of Artificial Sequence: Synthetic oligonucleotide
gaaaaaguuccaugccugctt

SEQ ID NO: 1149 - DNA, 21 bp, Artificial Sequence
  Description of Combined DNA/RNA Molecule: Synthetic oligonucleotide
  Description of Artificial Sequence: Synthetic oligonucleotide
ggaacuuuuuccguuaucatt

SEQ ID NO: 1150 - DNA, 21 bp, Artificial Sequence
  Description of Combined DNA/RNA Molecule: Synthetic oligonucleotide
  Description of Artificial Sequence: Synthetic oligonucleotide
ugauaacggaaaaaguucctt

SEQ ID NO: 1151 - DNA, 21 bp, Artificial Sequence
  Description of Combined DNA/RNA Molecule: Synthetic oligonucleotide
  Description of Artificial Sequence: Synthetic oligonucleotide
gaacuuuuuccguuaucactt

SEQ ID NO: 1152 - DNA, 21 bp, Artificial Sequence
  Description of Combined DNA/RNA Molecule: Synthetic oligonucleotide
  Description of Artificial Sequence: Synthetic oligonucleotide
gugauaacggaaaaaguuctt

SEQ ID NO: 1153 - DNA, 21 bp, Artificial Sequence
  Description of Combined DNA/RNA Molecule: Synthetic oligonucleotide
  Description of Artificial Sequence: Synthetic oligonucleotide
aacuuuuuccguuaucacctt

SEQ ID NO: 1154 - DNA, 21 bp, Artificial Sequence
  Description of Combined DNA/RNA Molecule: Synthetic oligonucleotide
  Description of Artificial Sequence: Synthetic oligonucleotide
ggugauaacggaaaaaguutt

SEQ ID NO: 1155 - DNA, 21 bp, Artificial Sequence
  Description of Combined DNA/RNA Molecule: Synthetic oligonucleotide
  Description of Artificial Sequence: Synthetic oligonucleotide
uaucacccaggccugauuctt

SEQ ID NO: 1156 - DNA, 21 bp, Artificial Sequence
  Description of Combined DNA/RNA Molecule: Synthetic oligonucleotide
  Description of Artificial Sequence: Synthetic oligonucleotide
gaaucaggccugggugauatt

SEQ ID NO: 1157 - DNA, 21 bp, Artificial Sequence
  Description of Combined DNA/RNA Molecule: Synthetic oligonucleotide
  Description of Artificial Sequence: Synthetic oligonucleotide
aggccugauucacuggccutt

SEQ ID NO: 1158 - DNA, 21 bp, Artificial Sequence
  Description of Combined DNA/RNA Molecule: Synthetic oligonucleotide
  Description of Artificial Sequence: Synthetic oligonucleotide
aggccagugaaucaggccutt

SEQ ID NO: 1159 - DNA, 21 bp, Artificial Sequence
  Description of Combined DNA/RNA Molecule: Synthetic oligonucleotide
  Description of Artificial Sequence: Synthetic oligonucleotide
ugauucacuggccuggcggtt

SEQ ID NO: 1160 - DNA, 21 bp, Artificial Sequence
  Description of Combined DNA/RNA Molecule: Synthetic oligonucleotide
  Description of Artificial Sequence: Synthetic oligonucleotide
ccgccaggccagugaaucatt

SEQ ID NO: 1161 - DNA, 21 bp, Artificial Sequence
  Description of Combined DNA/RNA Molecule: Synthetic oligonucleotide
  Description of Artificial Sequence: Synthetic oligonucleotide
auucacuggccuggcggagtt

SEQ ID NO: 1162 - DNA, 21 bp, Artificial Sequence
  Description of Combined DNA/RNA Molecule: Synthetic oligonucleotide
  Description of Artificial Sequence: Synthetic oligonucleotide
cuccgccaggccagugaautt

SEQ ID NO: 1163 - DNA, 21 bp, Artificial Sequence
  Description of Combined DNA/RNA Molecule: Synthetic oligonucleotide
  Description of Artificial Sequence: Synthetic oligonucleotide
gcuucuaaggcauggucggtt

SEQ ID NO: 1164 - DNA, 21 bp, Artificial Sequence
  Description of Combined DNA/RNA Molecule: Synthetic oligonucleotide
  Description of Artificial Sequence: Synthetic oligonucleotide
ccgaccaugccuuagaagctt

SEQ ID NO: 1165 - DNA, 21 bp, Artificial Sequence
  Description of Combined DNA/RNA Molecule: Synthetic oligonucleotide
  Description of Artificial Sequence: Synthetic oligonucleotide
cuucuaaggcauggucgggtt

SEQ ID NO: 1166 - DNA, 21 bp, Artificial Sequence
  Description of Combined DNA/RNA Molecule: Synthetic oligonucleotide
  Description of Artificial Sequence: Synthetic oligonucleotide
cccgaccaugccuuagaagtt

SEQ ID NO: 1167 - DNA, 21 bp, Artificial Sequence
  Description of Combined DNA/RNA Molecule: Synthetic oligonucleotide
  Description of Artificial Sequence: Synthetic oligonucleotide
gagggccaacaacuguccctt

SEQ ID NO: 1168 - DNA, 21 bp, Artificial Sequence
  Description of Combined DNA/RNA Molecule: Synthetic oligonucleotide
  Description of Artificial Sequence: Synthetic oligonucleotide
gggacaguuguuggcccuctt

SEQ ID NO: 1169 - DNA, 21 bp, Artificial Sequence
  Description of Combined DNA/RNA Molecule: Synthetic oligonucleotide
  Description of Artificial Sequence: Synthetic oligonucleotide
acugucccuccuugagcactt

SEQ ID NO: 1170 - DNA, 21 bp, Artificial Sequence
  Description of Combined DNA/RNA Molecule: Synthetic oligonucleotide
  Description of Artificial Sequence: Synthetic oligonucleotide
gugcucaaggagggacagutt

SEQ ID NO: 1171 - DNA, 21 bp, Artificial Sequence
  Description of Combined DNA/RNA Molecule: Synthetic oligonucleotide
  Description of Artificial Sequence: Synthetic oligonucleotide
acugucccuccuugagcactt

SEQ ID NO: 1172 - DNA, 21 bp, Artificial Sequence
  Description of Combined DNA/RNA Molecule: Synthetic oligonucleotide
  Description of Artificial Sequence: Synthetic oligonucleotide
gugcucaaggagggacagutt

SEQ ID NO: 1173 - DNA, 21 bp, Artificial Sequence
  Description of Combined DNA/RNA Molecule: Synthetic oligonucleotide
  Description of Artificial Sequence: Synthetic oligonucleotide
cugucccuccuugagcacctt

SEQ ID NO: 1174 - DNA, 21 bp, Artificial Sequence
  Description of Combined DNA/RNA Molecule: Synthetic oligonucleotide
  Description of Artificial Sequence: Synthetic oligonucleotide
ggugcucaaggagggacagtt

SEQ ID NO: 1175 - DNA, 21 bp, Artificial Sequence
  Description of Combined DNA/RNA Molecule: Synthetic oligonucleotide
  Description of Artificial Sequence: Synthetic oligonucleotide
cugucccuccuugagcacctt

SEQ ID NO: 1176 - DNA, 21 bp, Artificial Sequence
  Description of Combined DNA/RNA Molecule: Synthetic oligonucleotide
  Description of Artificial Sequence: Synthetic oligonucleotide
ggugcucaaggagggacagtt

SEQ ID NO: 1177 - DNA, 21 bp, Artificial Sequence
  Description of Combined DNA/RNA Molecule: Synthetic oligonucleotide
  Description of Artificial Sequence: Synthetic oligonucleotide
acauuuaucuuuugggucutt

SEQ ID NO: 1178 - DNA, 21 bp, Artificial Sequence
  Description of Combined DNA/RNA Molecule: Synthetic oligonucleotide
  Description of Artificial Sequence: Synthetic oligonucleotide
agacccaaaagauaaaugutt

SEQ ID NO: 1179 - DNA, 21 bp, Artificial Sequence
  Description of Combined DNA/RNA Molecule: Synthetic oligonucleotide
  Description of Artificial Sequence: Synthetic oligonucleotide
acauuuaucuuuugggucutt

SEQ ID NO: 1180 - DNA, 21 bp, Artificial Sequence
  Description of Combined DNA/RNA Molecule: Synthetic oligonucleotide
  Description of Artificial Sequence: Synthetic oligonucleotide
agacccaaaagauaaaugutt

SEQ ID NO: 1181 - DNA, 21 bp, Artificial Sequence
  Description of Combined DNA/RNA Molecule: Synthetic oligonucleotide
  Description of Artificial Sequence: Synthetic oligonucleotide
acauuuaucuuuugggucutt

SEQ ID NO: 1182 - DNA, 21 bp, Artificial Sequence
  Description of Combined DNA/RNA Molecule: Synthetic oligonucleotide
  Description of Artificial Sequence: Synthetic oligonucleotide
agacccaaaagauaaaugutt

SEQ ID NO: 1183 - DNA, 21 bp, Artificial Sequence
  Description of Combined DNA/RNA Molecule: Synthetic oligonucleotide
  Description of Artificial Sequence: Synthetic oligonucleotide
acauuuaucuuuugggucutt

SEQ ID NO: 1184 - DNA, 21 bp, Artificial Sequence
  Description of Combined DNA/RNA Molecule: Synthetic oligonucleotide
  Description of Artificial Sequence: Synthetic oligonucleotide
agacccaaaagauaaaugutt

SEQ ID NO: 1185 - DNA, 21 bp, Artificial Sequence
  Description of Combined DNA/RNA Molecule: Synthetic oligonucleotide
  Description of Artificial Sequence: Synthetic oligonucleotide
acauuuaucuuuugggucutt

SEQ ID NO: 1186 - DNA, 21 bp, Artificial Sequence
  Description of Combined DNA/RNA Molecule: Synthetic oligonucleotide
  Description of Artificial Sequence: Synthetic oligonucleotide
agacccaaaagauaaaugutt

SEQ ID NO: 1187 - DNA, 21 bp, Artificial Sequence
  Description of Combined DNA/RNA Molecule: Synthetic oligonucleotide
  Description of Artificial Sequence: Synthetic oligonucleotide
acauuuaucuuuugggucutt

SEQ ID NO: 1188 - DNA, 21 bp, Artificial Sequence
  Description of Combined DNA/RNA Molecule: Synthetic oligonucleotide
  Description of Artificial Sequence: Synthetic oligonucleotide
agacccaaaagauaaaugutt

SEQ ID NO: 1189 - DNA, 21 bp, Artificial Sequence
  Description of Combined DNA/RNA Molecule: Synthetic oligonucleotide
  Description of Artificial Sequence: Synthetic oligonucleotide
acauuuaucuuuugggucutt

SEQ ID NO: 1190 - DNA, 21 bp, Artificial Sequence
  Description of Combined DNA/RNA Molecule: Synthetic oligonucleotide
  Description of Artificial Sequence: Synthetic oligonucleotide
agacccaaaagauaaaugutt

SEQ ID NO: 1191 - DNA, 21 bp, Artificial Sequence
  Description of Combined DNA/RNA Molecule: Synthetic oligonucleotide
  Description of Artificial Sequence: Synthetic oligonucleotide
acauuuaucuuuugggucutt

SEQ ID NO: 1192 - DNA, 21 bp, Artificial Sequence
  Description of Combined DNA/RNA Molecule: Synthetic oligonucleotide
  Description of Artificial Sequence: Synthetic oligonucleotide
agacccaaaagauaaaugutt

SEQ ID NO: 1193 - DNA, 21 bp, Artificial Sequence
  Description of Combined DNA/RNA Molecule: Synthetic oligonucleotide
  Description of Artificial Sequence: Synthetic oligonucleotide
acauuuaucuuuugggucutt

SEQ ID NO: 1194 - DNA, 21 bp, Artificial Sequence
  Description of Combined DNA/RNA Molecule: Synthetic oligonucleotide
  Description of Artificial Sequence: Synthetic oligonucleotide
agacccaaaagauaaaugutt

SEQ ID NO: 1195 - DNA, 21 bp, Artificial Sequence
  Description of Combined DNA/RNA Molecule: Synthetic oligonucleotide
  Description of Artificial Sequence: Synthetic oligonucleotide
gccaucugcugccggagcctt

SEQ ID NO: 1196 - DNA, 21 bp, Artificial Sequence
  Description of Combined DNA/RNA Molecule: Synthetic oligonucleotide
  Description of Artificial Sequence: Synthetic oligonucleotide
ggcuccggcagcagauggctt

SEQ ID NO: 1197 - DNA, 21 bp, Artificial Sequence
  Description of Combined DNA/RNA Molecule: Synthetic oligonucleotide
  Description of Artificial Sequence: Synthetic oligonucleotide
gccaucugcugccggagcctt

SEQ ID NO: 1198 - DNA, 21 bp, Artificial Sequence
  Description of Combined DNA/RNA Molecule: Synthetic oligonucleotide
  Description of Artificial Sequence: Synthetic oligonucleotide
ggcuccggcagcagauggctt

SEQ ID NO: 1199 - DNA, 21 bp, Artificial Sequence
  Description of Combined DNA/RNA Molecule: Synthetic oligonucleotide
  Description of Artificial Sequence: Synthetic oligonucleotide
gccaucugcugccggagcctt

SEQ ID NO: 1200 - DNA, 21 bp, Artificial Sequence
  Description of Combined DNA/RNA Molecule: Synthetic oligonucleotide
  Description of Artificial Sequence: Synthetic oligonucleotide
ggcuccggcagcagauggctt

SEQ ID NO: 1201 - DNA, 21 bp, Artificial Sequence
  Description of Combined DNA/RNA Molecule: Synthetic oligonucleotide
  Description of Artificial Sequence: Synthetic oligonucleotide
gccaucugcugccggagcctt

SEQ ID NO: 1202 - DNA, 21 bp, Artificial Sequence
  Description of Combined DNA/RNA Molecule: Synthetic oligonucleotide
  Description of Artificial Sequence: Synthetic oligonucleotide
ggcuccggcagcagauggctt

SEQ ID NO: 1203 - DNA, 21 bp, Artificial Sequence
  Description of Combined DNA/RNA Molecule: Synthetic oligonucleotide
  Description of Artificial Sequence: Synthetic oligonucleotide
gccaucugcugccggagcctt

SEQ ID NO: 1204 - DNA, 21 bp, Artificial Sequence
  Description of Combined DNA/RNA Molecule: Synthetic oligonucleotide
  Description of Artificial Sequence: Synthetic oligonucleotide
ggcucaugcagcagauggctt

SEQ ID NO: 1205 - DNA, 21 bp, Artificial Sequence
  Description of Combined DNA/RNA Molecule: Synthetic oligonucleotide
  Description of Artificial Sequence: Synthetic oligonucleotide
gccaucugcugccggagcctt

SEQ ID NO: 1206 - DNA, 21 bp, Artificial Sequence
  Description of Combined DNA/RNA Molecule: Synthetic oligonucleotide
  Description of Artificial Sequence: Synthetic oligonucleotide
ggcucaugcagcagauggctt

SEQ ID NO: 1207 - DNA, 21 bp, Artificial Sequence
  Description of Combined DNA/RNA Molecule: Synthetic oligonucleotide
  Description of Artificial Sequence: Synthetic oligonucleotide
gccaucugcugccggagcctt

SEQ ID NO: 1208 - DNA, 21 bp, Artificial Sequence
  Description of Combined DNA/RNA Molecule: Synthetic oligonucleotide
  Description of Artificial Sequence: Synthetic oligonucleotide
ggcucaugcagcagauggctt

SEQ ID NO: 1209 - DNA, 21 bp, Artificial Sequence
  Description of Combined DNA/RNA Molecule: Synthetic oligonucleotide
  Description of Artificial Sequence: Synthetic oligonucleotide
cauuuaucuuuugggucugtt

SEQ ID NO: 1210 - DNA, 21 bp, Artificial Sequence
  Description of Combined DNA/RNA Molecule: Synthetic oligonucleotide
  Description of Artificial Sequence: Synthetic oligonucleotide
cagacccaaaagauaaaugtt

SEQ ID NO: 1211 - DNA, 21 bp, Artificial Sequence
  Description of Combined DNA/RNA Molecule: Synthetic oligonucleotide
  Description of Artificial Sequence: Synthetic oligonucleotide
cauuuaucuuuugggucugtt

SEQ ID NO: 1212 - DNA, 21 bp, Artificial Sequence
  Description of Combined DNA/RNA Molecule: Synthetic oligonucleotide
  Description of Artificial Sequence: Synthetic oligonucleotide
cagacccaaaagauaaaugtt

SEQ ID NO: 1213 - DNA, 21 bp, Artificial Sequence
  Description of Combined DNA/RNA Molecule: Synthetic oligonucleotide
  Description of Artificial Sequence: Synthetic oligonucleotide
uaucuuuugggucuguccutt

SEQ ID NO: 1214 - DNA, 21 bp, Artificial Sequence
  Description of Combined DNA/RNA Molecule: Synthetic oligonucleotide
  Description of Artificial Sequence: Synthetic oligonucleotide
aggacagacccaaaagauatt

SEQ ID NO: 1215 - DNA, 21 bp, Artificial Sequence
  Description of Combined DNA/RNA Molecule: Synthetic oligonucleotide
  Description of Artificial Sequence: Synthetic oligonucleotide
uaucuuuugggucuguccutt

SEQ ID NO: 1216 - DNA, 21 bp, Artificial Sequence
  Description of Combined DNA/RNA Molecule: Synthetic oligonucleotide
  Description of Artificial Sequence: Synthetic oligonucleotide
aggacagacccaaaagauatt

SEQ ID NO: 1217 - DNA, 21 bp, Artificial Sequence
  Description of Combined DNA/RNA Molecule: Synthetic oligonucleotide
  Description of Artificial Sequence: Synthetic oligonucleotide
cucuguugccuuuuuacagtt

SEQ ID NO: 1218 - DNA, 21 bp, Artificial Sequence
  Description of Combined DNA/RNA Molecule: Synthetic oligonucleotide
  Description of Artificial Sequence: Synthetic oligonucleotide
cuguaaaaaggcaacagagtt

SEQ ID NO: 1219 - DNA, 21 bp, Artificial Sequence
  Description of Combined DNA/RNA Molecule: Synthetic oligonucleotide
  Description of Artificial Sequence: Synthetic oligonucleotide
cucuguugccuuuuuacagtt

SEQ ID NO: 1220 - DNA, 21 bp, Artificial Sequence
  Description of Combined DNA/RNA Molecule: Synthetic oligonucleotide
  Description of Artificial Sequence: Synthetic oligonucleotide
cuguaaaaaggcaacagagtt

SEQ ID NO: 1221 - DNA, 21 bp, Artificial Sequence
  Description of Combined DNA/RNA Molecule: Synthetic oligonucleotide
  Description of Artificial Sequence: Synthetic oligonucleotide
ccuuuuuacagccaacuuutt

SEQ ID NO: 1222 - DNA, 21 bp, Artificial Sequence
  Description of Combined DNA/RNA Molecule: Synthetic oligonucleotide
  Description of Artificial Sequence: Synthetic oligonucleotide
aaaguuggcuguaaaaaggtt

SEQ ID NO: 1223 - DNA, 21 bp, Artificial Sequence
  Description of Combined DNA/RNA Molecule: Synthetic oligonucleotide
  Description of Artificial Sequence: Synthetic oligonucleotide
agccaacuuuucuagaccutt

SEQ ID NO: 1224 - DNA, 21 bp, Artificial Sequence
  Description of Combined DNA/RNA Molecule: Synthetic oligonucleotide
  Description of Artificial Sequence: Synthetic oligonucleotide
aggucuagaaaaguuggcutt

SEQ ID NO: 1225 - DNA, 21 bp, Artificial Sequence
  Description of Combined DNA/RNA Molecule: Synthetic oligonucleotide
  Description of Artificial Sequence: Synthetic oligonucleotide
acuuuucuagaccuguuuutt

SEQ ID NO: 1226 - DNA, 21 bp, Artificial Sequence
  Description of Combined DNA/RNA Molecule: Synthetic oligonucleotide
  Description of Artificial Sequence: Synthetic oligonucleotide
aaaacaggucuagaaaagutt

SEQ ID NO: 1227 - DNA, 21 bp, Artificial Sequence
  Description of Combined DNA/RNA Molecule: Synthetic oligonucleotide
  Description of Artificial Sequence: Synthetic oligonucleotide
uucuagaccuguuuugcuutt

SEQ ID NO: 1228 - DNA, 21 bp, Artificial Sequence
  Description of Combined DNA/RNA Molecule: Synthetic oligonucleotide
  Description of Artificial Sequence: Synthetic oligonucleotide
aagcaaaacaggucuagaatt

SEQ ID NO: 1229 - DNA, 21 bp, Artificial Sequence
  Description of Combined DNA/RNA Molecule: Synthetic oligonucleotide
  Description of Artificial Sequence: Synthetic oligonucleotide
uucuagaccuguuuugcuutt

SEQ ID NO: 1230 - DNA, 21 bp, Artificial Sequence
  Description of Combined DNA/RNA Molecule: Synthetic oligonucleotide
  Description of Artificial Sequence: Synthetic oligonucleotide
aagcaaaacaggucuagaatt

SEQ ID NO: 1231 - DNA, 21 bp, Artificial Sequence
  Description of Combined DNA/RNA Molecule: Synthetic oligonucleotide
  Description of Artificial Sequence: Synthetic oligonucleotide
uucuagaccuguuuugcuutt

SEQ ID NO: 1232 - DNA, 21 bp, Artificial Sequence
  Description of Combined DNA/RNA Molecule: Synthetic oligonucleotide
  Description of Artificial Sequence: Synthetic oligonucleotide
aagcaaaacaggucuagaatt

SEQ ID NO: 1233 - DNA, 21 bp, Artificial Sequence
  Description of Combined DNA/RNA Molecule: Synthetic oligonucleotide
  Description of Artificial Sequence: Synthetic oligonucleotide
uucuagaccuguuuugcuutt

SEQ ID NO: 1234 - DNA, 21 bp, Artificial Sequence
  Description of Combined DNA/RNA Molecule: Synthetic oligonucleotide
  Description of Artificial Sequence: Synthetic oligonucleotide
aagcaaaacaggucuagaatt

SEQ ID NO: 1235 - DNA, 21 bp, Artificial Sequence
  Description of Combined DNA/RNA Molecule: Synthetic oligonucleotide
  Description of Artificial Sequence: Synthetic oligonucleotide
uucuagaccuguuuugcuutt

SEQ ID NO: 1236 - DNA, 21 bp, Artificial Sequence
  Description of Combined DNA/RNA Molecule: Synthetic oligonucleotide
  Description of Artificial Sequence: Synthetic oligonucleotide
aagcaaaacaggucuagaatt

SEQ ID NO: 1237 - DNA, 21 bp, Artificial Sequence
  Description of Combined DNA/RNA Molecule: Synthetic oligonucleotide
  Description of Artificial Sequence: Synthetic oligonucleotide
uucuagaccuguuuugcuutt

SEQ ID NO: 1238 - DNA, 21 bp, Artificial Sequence
  Description of Combined DNA/RNA Molecule: Synthetic oligonucleotide
  Description of Artificial Sequence: Synthetic oligonucleotide
aagcaaaacaggucuagaatt

SEQ ID NO: 1239 - DNA, 20 bp, Artificial Sequence
  Description of Combined DNA/RNA Molecule: Synthetic oligonucleotide
  Description of Artificial Sequence: Synthetic oligonucleotide
uucuagaccuguuuucuutt

SEQ ID NO: 1240 - DNA, 21 bp, Artificial Sequence
  Description of Combined DNA/RNA Molecule: Synthetic oligonucleotide
  Description of Artificial Sequence: Synthetic oligonucleotide
aagcaaaacaggucuagaatt

SEQ ID NO: 1241 - DNA, 21 bp, Artificial Sequence
  Description of Combined DNA/RNA Molecule: Synthetic oligonucleotide
  Description of Artificial Sequence: Synthetic oligonucleotide
uucuagaccuguuuugcuutt

SEQ ID NO: 1242 - DNA, 21 bp, Artificial Sequence
  Description of Combined DNA/RNA Molecule: Synthetic oligonucleotide
  Description of Artificial Sequence: Synthetic oligonucleotide
aagcaaaacaggucuagaatt

SEQ ID NO: 1243 - DNA, 21 bp, Artificial Sequence
  Description of Combined DNA/RNA Molecule: Synthetic oligonucleotide
  Description of Artificial Sequence: Synthetic oligonucleotide
uucuagaccuguuuugcuutt

SEQ ID NO: 1244 - DNA, 21 bp, Artificial Sequence
  Description of Combined DNA/RNA Molecule: Synthetic oligonucleotide
  Description of Artificial Sequence: Synthetic oligonucleotide
aagcaaaacaggucuagaatt

SEQ ID NO: 1245 - DNA, 21 bp, Artificial Sequence
  Description of Combined DNA/RNA Molecule: Synthetic oligonucleotide
  Description of Artificial Sequence: Synthetic oligonucleotide
cauaggccuggaguuuauutt

SEQ ID NO: 1246 - DNA, 21 bp, Artificial Sequence
  Description of Combined DNA/RNA Molecule: Synthetic oligonucleotide
  Description of Artificial Sequence: Synthetic oligonucleotide
aauaaacuccaggccuaugtt

SEQ ID NO: 1247 - DNA, 21 bp, Artificial Sequence
  Description of Combined DNA/RNA Molecule: Synthetic oligonucleotide
  Description of Artificial Sequence: Synthetic oligonucleotide
cauaggccuggaguuuauutt

SEQ ID NO: 1248 - DNA, 21 bp, Artificial Sequence
  Description of Combined DNA/RNA Molecule: Synthetic oligonucleotide
  Description of Artificial Sequence: Synthetic oligonucleotide
aauaaacuccaggccuaugtt

SEQ ID NO: 1249 - DNA, 21 bp, Artificial Sequence
  Description of Combined DNA/RNA Molecule: Synthetic oligonucleotide
  Description of Artificial Sequence: Synthetic oligonucleotide
cauaggccuggaguuuauutt

SEQ ID NO: 1250 - DNA, 21 bp, Artificial Sequence
  Description of Combined DNA/RNA Molecule: Synthetic oligonucleotide
  Description of Artificial Sequence: Synthetic oligonucleotide
aauaaacuccaggccuaugtt

SEQ ID NO: 1251 - DNA, 21 bp, Artificial Sequence
  Description of Combined DNA/RNA Molecule: Synthetic oligonucleotide
  Description of Artificial Sequence: Synthetic oligonucleotide
cauaggccuggaguuuauutt

SEQ ID NO: 1252 - DNA, 21 bp, Artificial Sequence
  Description of Combined DNA/RNA Molecule: Synthetic oligonucleotide
  Description of Artificial Sequence: Synthetic oligonucleotide
aauaaacuccaggccuaugtt

SEQ ID NO: 1253 - DNA, 21 bp, Artificial Sequence
  Description of Combined DNA/RNA Molecule: Synthetic oligonucleotide
  Description of Artificial Sequence: Synthetic oligonucleotide
cauaggccuggaguuuauutt

SEQ ID NO: 1254 - DNA, 21 bp, Artificial Sequence
  Description of Combined DNA/RNA Molecule: Synthetic oligonucleotide
  Description of Artificial Sequence: Synthetic oligonucleotide
aauaaacuccaggccuaugtt

SEQ ID NO: 1255 - DNA, 21 bp, Artificial Sequence
  Description of Combined DNA/RNA Molecule: Synthetic oligonucleotide
  Description of Artificial Sequence: Synthetic oligonucleotide
cauaggccuggaguuuauutt

SEQ ID NO: 1256 - DNA, 21 bp, Artificial Sequence
  Description of Combined DNA/RNA Molecule: Synthetic oligonucleotide
  Description of Artificial Sequence: Synthetic oligonucleotide
aauaaacuccaggccuaugtt

SEQ ID NO: 1257 - DNA, 21 bp, Artificial Sequence
  Description of Combined DNA/RNA Molecule: Synthetic oligonucleotide
  Description of Artificial Sequence: Synthetic oligonucleotide
cauaggccuggaguuuauutt

SEQ ID NO: 1258 - DNA, 21 bp, Artificial Sequence
  Description of Combined DNA/RNA Molecule: Synthetic oligonucleotide
  Description of Artificial Sequence: Synthetic oligonucleotide
aauaaacuccaggccuaugtt

SEQ ID NO: 1259 - DNA, 21 bp, Artificial Sequence
  Description of Combined DNA/RNA Molecule: Synthetic oligonucleotide
  Description of Artificial Sequence: Synthetic oligonucleotide
ucuagaccuguuuugcuuutt

SEQ ID NO: 1260 - DNA, 21 bp, Artificial Sequence
  Description of Combined DNA/RNA Molecule: Synthetic oligonucleotide
  Description of Artificial Sequence: Synthetic oligonucleotide
aaagcaaaacaggucuagatt

SEQ ID NO: 1261 - DNA, 21 bp, Artificial Sequence
  Description of Combined DNA/RNA Molecule: Synthetic oligonucleotide
  Description of Artificial Sequence: Synthetic oligonucleotide
ucuagaccuguuuugcuuutt

SEQ ID NO: 1262 - DNA, 21 bp, Artificial Sequence
  Description of Combined DNA/RNA Molecule: Synthetic oligonucleotide
  Description of Artificial Sequence: Synthetic oligonucleotide
aaagcaaaacaggucuagatt

SEQ ID NO: 1263 - DNA, 21 bp, Artificial Sequence
  Description of Combined DNA/RNA Molecule: Synthetic oligonucleotide
  Description of Artificial Sequence: Synthetic oligonucleotide
ucuagaccuguuuugcuuutt

SEQ ID NO: 1264 - DNA, 21 bp, Artificial Sequence
  Description of Combined DNA/RNA Molecule: Synthetic oligonucleotide
  Description of Artificial Sequence: Synthetic oligonucleotide
aaagcaaaacaggucuagatt

SEQ ID NO: 1265 - DNA, 21 bp, Artificial Sequence
  Description of Combined DNA/RNA Molecule: Synthetic oligonucleotide
  Description of Artificial Sequence: Synthetic oligonucleotide
ucuagaccuguuuugcuuutt

SEQ ID NO: 1266 - DNA, 21 bp, Artificial Sequence
  Description of Combined DNA/RNA Molecule: Synthetic oligonucleotide
  Description of Artificial Sequence: Synthetic oligonucleotide
aaagcaaaacaggucuagatt

SEQ ID NO: 1267 - DNA, 21 bp, Artificial Sequence
  Description of Combined DNA/RNA Molecule: Synthetic oligonucleotide
  Description of Artificial Sequence: Synthetic oligonucleotide
ucuagaccuguuuugcuuutt

SEQ ID NO: 1268 - DNA, 21 bp, Artificial Sequence
  Description of Combined DNA/RNA Molecule: Synthetic oligonucleotide
  Description of Artificial Sequence: Synthetic oligonucleotide
aaagcaaaacaggucuagatt

SEQ ID NO: 1269 - DNA, 21 bp, Artificial Sequence
  Description of Combined DNA/RNA Molecule: Synthetic oligonucleotide
  Description of Artificial Sequence: Synthetic oligonucleotide
ucuagaccuguuuugcuuutt

SEQ ID NO: 1270 - DNA, 21 bp, Artificial Sequence
  Description of Combined DNA/RNA Molecule: Synthetic oligonucleotide
  Description of Artificial Sequence: Synthetic oligonucleotide
aaagcaaaacaggucuagatt

SEQ ID NO: 1271 - DNA, 21 bp, Artificial Sequence
  Description of Combined DNA/RNA Molecule: Synthetic oligonucleotide
  Description of Artificial Sequence: Synthetic oligonucleotide
ucuagaccuguuuugcuuutt

SEQ ID NO: 1272 - DNA, 21 bp, Artificial Sequence
  Description of Combined DNA/RNA Molecule: Synthetic oligonucleotide
  Description of Artificial Sequence: Synthetic oligonucleotide
aaagcaaaacaggucuagatt

SEQ ID NO: 1273 - DNA, 21 bp, Artificial Sequence
  Description of Combined DNA/RNA Molecule: Synthetic oligonucleotide
  Description of Artificial Sequence: Synthetic oligonucleotide
ucuagaccuguuuugcuuutt

SEQ ID NO: 1274 - DNA, 21 bp, Artificial Sequence
  Description of Combined DNA/RNA Molecule: Synthetic oligonucleotide
  Description of Artificial Sequence: Synthetic oligonucleotide
aaagcaaaacaggucuagatt

SEQ ID NO: 1275 - DNA, 21 bp, Artificial Sequence
  Description of Combined DNA/RNA Molecule: Synthetic oligonucleotide
  Description of Artificial Sequence: Synthetic oligonucleotide
ucuagaccuguuuugcuuutt

SEQ ID NO: 1276 - DNA, 21 bp, Artificial Sequence
  Description of Combined DNA/RNA Molecule: Synthetic oligonucleotide
  Description of Artificial Sequence: Synthetic oligonucleotide
aaagcaaaacaggucuagatt

SEQ ID NO: 1277 - DNA, 21 bp, Artificial Sequence
  Description of Combined DNA/RNA Molecule: Synthetic oligonucleotide
  Description of Artificial Sequence: Synthetic oligonucleotide
ucauaggccuggaguuuautt

SEQ ID NO: 1278 - DNA, 21 bp, Artificial Sequence
  Description of Combined DNA/RNA Molecule: Synthetic oligonucleotide
  Description of Artificial Sequence: Synthetic oligonucleotide
auaaacuccaggccuaugatt

SEQ ID NO: 1279 - DNA, 21 bp, Artificial Sequence
  Description of Combined DNA/RNA Molecule: Synthetic oligonucleotide
  Description of Artificial Sequence: Synthetic oligonucleotide
ucauaggccuggaguuuautt

SEQ ID NO: 1280 - DNA, 21 bp, Artificial Sequence
  Description of Combined DNA/RNA Molecule: Synthetic oligonucleotide
  Description of Artificial Sequence: Synthetic oligonucleotide
auaaacuccaggccuaugatt

SEQ ID NO: 1281 - DNA, 21 bp, Artificial Sequence
  Description of Combined DNA/RNA Molecule: Synthetic oligonucleotide
  Description of Artificial Sequence: Synthetic oligonucleotide
ucauaggccuggaguuuautt

SEQ ID NO: 1282 - DNA, 21 bp, Artificial Sequence
  Description of Combined DNA/RNA Molecule: Synthetic oligonucleotide
  Description of Artificial Sequence: Synthetic oligonucleotide
auaaacuccaggccuaugatt

SEQ ID NO: 1283 - DNA, 21 bp, Artificial Sequence
  Description of Combined DNA/RNA Molecule: Synthetic oligonucleotide
  Description of Artificial Sequence: Synthetic oligonucleotide
ucauaggccuggaguuuautt

SEQ ID NO: 1284 - DNA, 21 bp, Artificial Sequence
  Description of Combined DNA/RNA Molecule: Synthetic oligonucleotide
  Description of Artificial Sequence: Synthetic oligonucleotide
auaaacuccaggccuaugatt

SEQ ID NO: 1285 - DNA, 21 bp, Artificial Sequence
  Description of Combined DNA/RNA Molecule: Synthetic oligonucleotide
  Description of Artificial Sequence: Synthetic oligonucleotide
ucauaggccuggaguuuautt

SEQ ID NO: 1286 - DNA, 21 bp, Artificial Sequence
  Description of Combined DNA/RNA Molecule: Synthetic oligonucleotide
  Description of Artificial Sequence: Synthetic oligonucleotide
auaaacuccaggccuaugatt

SEQ ID NO: 1287 - DNA, 21 bp, Artificial Sequence
  Description of Combined DNA/RNA Molecule: Synthetic oligonucleotide
  Description of Artificial Sequence: Synthetic oligonucleotide
ucauaggccuggaguuuautt

SEQ ID NO: 1288 - DNA, 21 bp, Artificial Sequence
  Description of Combined DNA/RNA Molecule: Synthetic oligonucleotide
  Description of Artificial Sequence: Synthetic oligonucleotide
auaaacuccaggccuaugatt

SEQ ID NO: 1289 - DNA, 21 bp, Artificial Sequence
  Description of Combined DNA/RNA Molecule: Synthetic oligonucleotide
  Description of Artificial Sequence: Synthetic oligonucleotide
ucauaggccuggaguuuautt

SEQ ID NO: 1290 - DNA, 21 bp, Artificial Sequence
  Description of Combined DNA/RNA Molecule: Synthetic oligonucleotide
  Description of Artificial Sequence: Synthetic oligonucleotide
auaaacuccaggccuaugatt

SEQ ID NO: 1291 - DNA, 21 bp, Artificial Sequence
  Description of Combined DNA/RNA Molecule: Synthetic oligonucleotide
  Description of Artificial Sequence: Synthetic oligonucleotide
ugaagauauuuauucugggtt

SEQ ID NO: 1292 - DNA, 21 bp, Artificial Sequence
  Description of Combined DNA/RNA Molecule: Synthetic oligonucleotide
  Description of Artificial Sequence: Synthetic oligonucleotide
cccagaauaaauaucuucatt

SEQ ID NO: 1293 - DNA, 21 bp, Artificial Sequence
  Description of Combined DNA/RNA Molecule: Synthetic oligonucleotide
  Description of Artificial Sequence: Synthetic oligonucleotide
ugaagauauuuauucugggtt

SEQ ID NO: 1294 - DNA, 21 bp, Artificial Sequence
  Description of Combined DNA/RNA Molecule: Synthetic oligonucleotide
  Description of Artificial Sequence: Synthetic oligonucleotide
cccagaauaaauaucuucatt

SEQ ID NO: 1295 - DNA, 21 bp, Artificial Sequence
  Description of Combined DNA/RNA Molecule: Synthetic oligonucleotide
  Description of Artificial Sequence: Synthetic oligonucleotide
ucuggguuuuguagcauuutt

SEQ ID NO: 1296 - DNA, 21 bp, Artificial Sequence
  Description of Combined DNA/RNA Molecule: Synthetic oligonucleotide
  Description of Artificial Sequence: Synthetic oligonucleotide
aaaugcuacaaaacccagatt

SEQ ID NO: 1297 - DNA, 21 bp, Artificial Sequence
  Description of Combined DNA/RNA Molecule: Synthetic oligonucleotide
  Description of Artificial Sequence: Synthetic oligonucleotide
ucuggguuuuguagcauuutt

SEQ ID NO: 1298 - DNA, 21 bp, Artificial Sequence
  Description of Combined DNA/RNA Molecule: Synthetic oligonucleotide
  Description of Artificial Sequence: Synthetic oligonucleotide
aaaugcuacaaaacccagatt

SEQ ID NO: 1299 - DNA, 21 bp, Artificial Sequence
  Description of Combined DNA/RNA Molecule: Synthetic oligonucleotide
  Description of Artificial Sequence: Synthetic oligonucleotide
auaaaaacaaacaaacguutt

SEQ ID NO: 1300 - DNA, 21 bp, Artificial Sequence
  Description of Combined DNA/RNA Molecule: Synthetic oligonucleotide
  Description of Artificial Sequence: Synthetic oligonucleotide
aacguuuguuuguuuuuautt

SEQ ID NO: 1301 - DNA, 21 bp, Artificial Sequence
  Description of Combined DNA/RNA Molecule: Synthetic oligonucleotide
  Description of Artificial Sequence: Synthetic oligonucleotide
aaacaaacaaacguugucctt

SEQ ID NO: 1302 - DNA, 21 bp, Artificial Sequence
  Description of Combined DNA/RNA Molecule: Synthetic oligonucleotide
  Description of Artificial Sequence: Synthetic oligonucleotide
ggacaacguuuguuuguuutt

SEQ ID NO: 1303 - DNA, 21 bp, Artificial Sequence
  Description of Combined DNA/RNA Molecule: Synthetic oligonucleotide
  Description of Artificial Sequence: Synthetic oligonucleotide
aacaaacaaacguuguccutt

SEQ ID NO: 1304 - DNA, 21 bp, Artificial Sequence
  Description of Combined DNA/RNA Molecule: Synthetic oligonucleotide
  Description of Artificial Sequence: Synthetic oligonucleotide
aggacaacguuuguuuguutt

SEQ ID NO: 1305 - DNA, 21 bp, Artificial Sequence
  Description of Combined DNA/RNA Molecule: Synthetic oligonucleotide
  Description of Artificial Sequence: Synthetic oligonucleotide
gccuggaguuuauucggaatt

SEQ ID NO: 1306 - DNA, 21 bp, Artificial Sequence
  Description of Combined DNA/RNA Molecule: Synthetic oligonucleotide
  Description of Artificial Sequence: Synthetic oligonucleotide
uuccgaauaaacuccaggctt

SEQ ID NO: 1307 - DNA, 21 bp, Artificial Sequence
  Description of Combined DNA/RNA Molecule: Synthetic oligonucleotide
  Description of Artificial Sequence: Synthetic oligonucleotide
gccuggaguuuauucggaatt

SEQ ID NO: 1308 - DNA, 21 bp, Artificial Sequence
  Description of Combined DNA/RNA Molecule: Synthetic oligonucleotide
  Description of Artificial Sequence: Synthetic oligonucleotide
uuccgaauaaacuccaggctt

SEQ ID NO: 1309 - DNA, 21 bp, Artificial Sequence
  Description of Combined DNA/RNA Molecule: Synthetic oligonucleotide
  Description of Artificial Sequence: Synthetic oligonucleotide
gccuggaguuuauucggaatt

SEQ ID NO: 1310 - DNA, 21 bp, Artificial Sequence
  Description of Combined DNA/RNA Molecule: Synthetic oligonucleotide
  Description of Artificial Sequence: Synthetic oligonucleotide
uuccgaauaaacuccaggctt

SEQ ID NO: 1311 - DNA, 21 bp, Artificial Sequence
  Description of Combined DNA/RNA Molecule: Synthetic oligonucleotide
  Description of Artificial Sequence: Synthetic oligonucleotide
gccuggaguuuauucggaatt

SEQ ID NO: 1312 - DNA, 21 bp, Artificial Sequence
  Description of Combined DNA/RNA Molecule: Synthetic oligonucleotide
  Description of Artificial Sequence: Synthetic oligonucleotide
uuccgaauaaacuccaggctt

SEQ ID NO: 1313 - DNA, 21 bp, Artificial Sequence
  Description of Combined DNA/RNA Molecule: Synthetic oligonucleotide
  Description of Artificial Sequence: Synthetic oligonucleotide
gccuggaguuuauucggaatt

SEQ ID NO: 1314 - DNA, 21 bp, Artificial Sequence
  Description of Combined DNA/RNA Molecule: Synthetic oligonucleotide
  Description of Artificial Sequence: Synthetic oligonucleotide
uuccgaauaaacuccaggctt

SEQ ID NO: 1315 - DNA, 21 bp, Artificial Sequence
  Description of Combined DNA/RNA Molecule: Synthetic oligonucleotide
  Description of Artificial Sequence: Synthetic oligonucleotide
gccuggaguuuauucggaatt

SEQ ID NO: 1316 - DNA, 21 bp, Artificial Sequence
  Description of Combined DNA/RNA Molecule: Synthetic oligonucleotide
  Description of Artificial Sequence: Synthetic oligonucleotide
uuccgaauaaacuccaggctt

SEQ ID NO: 1317 - DNA, 21 bp, Artificial Sequence
  Description of Combined DNA/RNA Molecule: Synthetic oligonucleotide
  Description of Artificial Sequence: Synthetic oligonucleotide
gccuggaguuuauucggaatt

SEQ ID NO: 1318 - DNA, 21 bp, Artificial Sequence
  Description of Combined DNA/RNA Molecule: Synthetic oligonucleotide
  Description of Artificial Sequence: Synthetic oligonucleotide
uuccgaauaaacuccaggctt

SEQ ID NO: 1319 - DNA, 21 bp, Artificial Sequence
  Description of Combined DNA/RNA Molecule: Synthetic oligonucleotide
  Description of Artificial Sequence: Synthetic oligonucleotide
gccuggaguuuauucggaatt

SEQ ID NO: 1320 - DNA, 21 bp, Artificial Sequence
  Description of Combined DNA/RNA Molecule: Synthetic oligonucleotide
  Description of Artificial Sequence: Synthetic oligonucleotide
uuccgaauaaacuccaggctt

SEQ ID NO: 1321 - DNA, 21 bp, Artificial Sequence
  Description of Combined DNA/RNA Molecule: Synthetic oligonucleotide
  Description of Artificial Sequence: Synthetic oligonucleotide
gccuggaguuuauucggaatt

SEQ ID NO: 1322 - DNA, 21 bp, Artificial Sequence
  Description of Combined DNA/RNA Molecule: Synthetic oligonucleotide
  Description of Artificial Sequence: Synthetic oligonucleotide
uuccgaauaaacuccaggctt

SEQ ID NO: 1323 - DNA, 21 bp, Artificial Sequence
  Description of Combined DNA/RNA Molecule: Synthetic oligonucleotide
  Description of Artificial Sequence: Synthetic oligonucleotide
gccuggaguuuauucggaatt

SEQ ID NO: 1324 - DNA, 21 bp, Artificial Sequence
  Description of Combined DNA/RNA Molecule: Synthetic oligonucleotide
  Description of Artificial Sequence: Synthetic oligonucleotide
uuccgaauaaacuccaggctt

SEQ ID NO: 1325 - DNA, 21 bp, Artificial Sequence
  Description of Combined DNA/RNA Molecule: Synthetic oligonucleotide
  Description of Artificial Sequence: Synthetic oligonucleotide
gccuggaguuuauucggaatt

SEQ ID NO: 1326 - DNA, 21 bp, Artificial Sequence
  Description of Combined DNA/RNA Molecule: Synthetic oligonucleotide
  Description of Artificial Sequence: Synthetic oligonucleotide
uuccgaauaaacuccaggctt

SEQ ID NO: 1327 - RNA, 19 nt, Artificial Sequence
  Description of Artificial Sequence: Synthetic oligonucleotide
gccuggaguuuauucggaa

SEQ ID NO: 1328 - RNA, 21 nt, Artificial Sequence
  Description of Artificial Sequence: Synthetic oligonucleotide
uuccgaauaaacuccaggccu

SEQ ID NO: 1329 - RNA, 20 nt, Artificial Sequence
  Description of Artificial Sequence: Synthetic oligonucleotide
gccuggaguuuauucggaaa

SEQ ID NO: 1330 - RNA, 22 nt, Artificial Sequence
  Description of Artificial Sequence: Synthetic oligonucleotide
uuuccgaauaaacuccaggccu

SEQ ID NO: 1331 - RNA, 21 nt, Artificial Sequence
  Description of Artificial Sequence: Synthetic oligonucleotide
gccuggaguuuauucggaaaa

SEQ ID NO: 1332 - RNA, 23 nt, Artificial Sequence
  Description of Artificial Sequence: Synthetic oligonucleotide
uuuuccgaauaaacuccaggccu

SEQ ID NO: 1333 - RNA, 22 nt, Artificial Sequence
  Description of Artificial Sequence: Synthetic oligonucleotide
gccuggaguuuauucggaaaag

SEQ ID NO: 1334 - RNA, 24 nt, Artificial Sequence
  Description of Artificial Sequence: Synthetic oligonucleotide
cuuuuccgaauaaacuccaggccu

SEQ ID NO: 1335 - DNA, 22 bp, Artificial Sequence
  Description of Combined DNA/RNA Molecule: Synthetic oligonucleotide
  Description of Artificial Sequence: Synthetic oligonucleotide
  modified_base (22)..(22): 3'-terminal abasic nucleotide
gccuggaguuuauucggaattn

SEQ ID NO: 1336 - DNA, 22 bp, Artificial Sequence
  Description of Combined DNA/RNA Molecule: Synthetic oligonucleotide
  Description of Artificial Sequence: Synthetic oligonucleotide
  modified_base (22)..(22): 3'-terminal abasic nucleotide
uuccgaauaaacuccaggcttn

SEQ ID NO: 1337 - DNA, 23 bp, Artificial Sequence
  Description of Combined DNA/RNA Molecule: Synthetic oligonucleotide
  Description of Artificial Sequence: Synthetic oligonucleotide
  modified_base (23)..(23): 3'-terminal abasic nucleotide
gccuggaguuuauucggaaattn

SEQ ID NO: 1338 - DNA, 23 bp, Artificial Sequence
  Description of Combined DNA/RNA Molecule: Synthetic oligonucleotide
  Description of Artificial Sequence: Synthetic oligonucleotide
  modified_base (23)..(23): 3'-terminal abasic nucleotide
uuuccgaauaaacuccaggcttn

SEQ ID NO: 1339 - DNA, 24 bp, Artificial Sequence
  Description of Combined DNA/RNA Molecule: Synthetic oligonucleotide
  Description of Artificial Sequence: Synthetic oligonucleotide
  modified_base (24)..(24): 3'-terminal abasic nucleotide
gccuggaguuuauucggaaaattn

SEQ ID NO: 1340 - DNA, 24 bp, Artificial Sequence
  Description of Combined DNA/RNA Molecule: Synthetic oligonucleotide
  Description of Artificial Sequence: Synthetic oligonucleotide
  modified_base (24)..(24): 3'-terminal abasic nucleotide
uuuuccgaauaaacuccaggcttn

SEQ ID NO: 1341 - DNA, 25 bp, Artificial Sequence
  Description of Combined DNA/RNA Molecule: Synthetic oligonucleotide
  Description of Artificial Sequence: Synthetic oligonucleotide
  modified_base (25)..(25): 3'-terminal abasic nucleotide
gccuggaguuuauucggaaaagttn

SEQ ID NO: 1342 - DNA, 25 bp, Artificial Sequence
  Description of Combined DNA/RNA Molecule: Synthetic oligonucleotide
  Description of Artificial Sequence: Synthetic oligonucleotide
  modified_base (25)..(25): 3'-terminal abasic nucleotide
cuuuuccgaauaaacuccaggcttn

SEQ ID NO: 1343 - DNA, 21 bp, Artificial Sequence
  Description of Combined DNA/RNA Molecule: Synthetic oligonucleotide
  Description of Artificial Sequence: Synthetic oligonucleotide
gccuggaguuuauucggaatt

SEQ ID NO: 1344 - RNA, 21 nt, Artificial Sequence
  Description of Artificial Sequence: Synthetic oligonucleotide
uuccgaauaaacuccaggccu

SEQ ID NO: 1345 - DNA, 21 bp, Artificial Sequence
  Description of Combined DNA/RNA Molecule: Synthetic oligonucleotide
  Description of Artificial Sequence: Synthetic oligonucleotide
gccuggaguuuauucggaatt

SEQ ID NO: 1346 - RNA, 21 nt, Artificial Sequence
  Description of Artificial Sequence: Synthetic oligonucleotide
uuccgaauaaacuccaggccu

SEQ ID NO: 1347 - RNA, 19 nt, Artificial Sequence
  Description of Artificial Sequence: Synthetic oligonucleotide
gccuggaguuuauucggaa

SEQ ID NO: 1348 - DNA, 22 bp, Artificial Sequence
  Description of Combined DNA/RNA Molecule: Synthetic oligonucleotide
  Description of Artificial Sequence: Synthetic oligonucleotide
  modified_base (22)..(22): 3'-terminal abasic nucleotide
uuccgaauaaacuccaggcttn

SEQ ID NO: 1349 - RNA, 19 nt, Artificial Sequence
  Description of Artificial Sequence: Synthetic oligonucleotide
gccuggaguuuauucggaa

SEQ ID NO: 1350 - DNA, 21 bp, Artificial Sequence
  Description of Combined DNA/RNA Molecule: Synthetic oligonucleotide
  Description of Artificial Sequence: Synthetic oligonucleotide
uuccgaauaaacuccaggctt

SEQ ID NO: 1351 - RNA, 19 nt, Artificial Sequence
  Description of Artificial Sequence: Synthetic oligonucleotide
gccuggaguuuauucggaa

SEQ ID NO: 1352 - DNA, 21 bp, Artificial Sequence
  Description of Combined DNA/RNA Molecule: Synthetic oligonucleotide
  Description of Artificial Sequence: Synthetic oligonucleotide
uuccgaauaaacuccaggctt

SEQ ID NO: 1353 - RNA, 19 nt, Artificial Sequence
  Description of Artificial Sequence: Synthetic oligonucleotide
gccuggaguuuauucggaa

SEQ ID NO: 1354 - DNA, 21 bp, Artificial Sequence
  Description of Combined DNA/RNA Molecule: Synthetic oligonucleotide
  Description of Artificial Sequence: Synthetic oligonucleotide
uuccgaauaaacuccaggctt

SEQ ID NO: 1355 - RNA, 19 nt, Artificial Sequence
  Description of Artificial Sequence: Synthetic oligonucleotide
gccuggaguuuauucggaa

SEQ ID NO: 1356 - RNA, 19 nt, Artificial Sequence
  Description of Artificial Sequence: Synthetic oligonucleotide
uuccgaauaaacuccaggc

SEQ ID NO: 1357 - DNA, 22 bp, Artificial Sequence
  Description of Combined DNA/RNA Molecule: Synthetic oligonucleotide
  Description of Artificial Sequence: Synthetic oligonucleotide
  modified_base (7)..(7): a, c, g, t, u, unknown or other
gccuggnaguuuauucggaatt

SEQ ID NO: 1358 - DNA, 21 bp, Artificial Sequence
  Description of Combined DNA/RNA Molecule: Synthetic oligonucleotide
  Description of Artificial Sequence: Synthetic oligonucleotide
uuccgaauaaacuccaggctt

SEQ ID NO: 1359 - DNA, 22 bp, Artificial Sequence
  Description of Combined DNA/RNA Molecule: Synthetic oligonucleotide
  Description of Artificial Sequence: Synthetic oligonucleotide
  modified_base (22)..(22): 3'-terminal abasic nucleotide
gccuggaguuuauucggaattn

SEQ ID NO: 1360 - DNA, 22 bp, Artificial Sequence
  Description of Combined DNA/RNA Molecule: Synthetic oligonucleotide
  Description of Artificial Sequence: Synthetic oligonucleotide
  modified_base (22)..(22): 3'-terminal abasic nucleotide
uuccgaauaaacuccaggcttn

SEQ ID NO: 1361 - RNA, 19 nt, Artificial Sequence
  Description of Artificial Sequence: Synthetic oligonucleotide
gccuggaguuuauucggaa

SEQ ID NO: 1362 - RNA, 21 nt, Artificial Sequence
  Description of Artificial Sequence: Synthetic oligonucleotide
uuccgaauaaacuccaggccu

SEQ ID NO: 1363 - DNA, 22 bp, Artificial Sequence
  Description of Combined DNA/RNA Molecule: Synthetic oligonucleotide
  Description of Artificial Sequence: Synthetic oligonucleotide
  modified_base (7)..(7): a, c, g, t, u, unknown or other
gccuggnaguuuauucggaatt

SEQ ID NO: 1364 - DNA, 21 bp, Artificial Sequence
  Description of Combined DNA/RNA Molecule: Synthetic oligonucleotide
  Description of Artificial Sequence: Synthetic oligonucleotide
uuccgaauaaacuccaggctt

SEQ ID NO: 1365 - DNA, 22 bp, Artificial Sequence
  Description of Combined DNA/RNA Molecule: Synthetic oligonucleotide
  Description of Artificial Sequence: Synthetic oligonucleotide
  modified_base (22)..(22): 3'-terminal abasic nucleotide
gccuggaguuuauucggaattn

SEQ ID NO: 1366 - DNA, 22 bp, Artificial Sequence
  Description of Combined DNA/RNA Molecule: Synthetic oligonucleotide
  Description of Artificial Sequence: Synthetic oligonucleotide
  modified_base (22)..(22): 3'-terminal abasic nucleotide
uuccgaauaaacuccaggcttn

SEQ ID NO: 1367 - RNA, 19 nt, Artificial Sequence
  Description of Artificial Sequence: Synthetic oligonucleotide
gccuggaguuuauucggaa

SEQ ID NO: 1368 - RNA, 21 nt, Artificial Sequence
  Description of Artificial Sequence: Synthetic oligonucleotide
uuccgaauaaacuccaggccu

SEQ ID NO: 1369 - DNA, 22 bp, Artificial Sequence
  Description of Combined DNA/RNA Molecule: Synthetic oligonucleotide
  Description of Artificial Sequence: Synthetic oligonucleotide
  modified_base (7)..(7): a, c, g, t, u, unknown or other
gccuggnaguuuauucggaatt

SEQ ID NO: 1370 - DNA, 21 bp, Artificial Sequence
  Description of Combined DNA/RNA Molecule: Synthetic oligonucleotide
  Description of Artificial Sequence: Synthetic oligonucleotide
uuccgaauaaacuccaggctt

SEQ ID NO: 1371 - DNA, 22 bp, Artificial Sequence
  Description of Combined DNA/RNA Molecule: Synthetic oligonucleotide
  Description of Artificial Sequence: Synthetic oligonucleotide
  modified_base (22)..(22): 3'-terminal abasic nucleotide
gccuggaguuuauucggaattn

SEQ ID NO: 1372 - DNA, 22 bp, Artificial Sequence
  Description of Combined DNA/RNA Molecule: Synthetic oligonucleotide
  Description of Artificial Sequence: Synthetic oligonucleotide
  modified_base (22)..(22): 3'-terminal abasic nucleotide
uuccgaauaaacuccaggcttn

SEQ ID NO: 1373 - RNA, 19 nt, Artificial Sequence
  Description of Artificial Sequence: Synthetic oligonucleotide
gccuggaguuuauucggaa

SEQ ID NO: 1374 - RNA, 21 nt, Artificial Sequence
  Description of Artificial Sequence: Synthetic oligonucleotide
uuccgaauaaacuccaggccu

SEQ ID NO: 1375 - RNA, 19 nt, Artificial Sequence
  Description of Artificial Sequence: Synthetic oligonucleotide
gccuggaguuuauucggaa

SEQ ID NO: 1376 - RNA, 19 nt, Artificial Sequence
  Description of Artificial Sequence: Synthetic oligonucleotide
uuccgaauaaacuccaggc

SEQ ID NO: 1377 - RNA, 19 nt, Artificial Sequence
  Description of Artificial Sequence: Synthetic oligonucleotide
gccuggaguuuauucggaa

SEQ ID NO: 1378 - RNA, 19 nt, Artificial Sequence
  Description of Artificial Sequence: Synthetic oligonucleotide
uuccgaauaaacuccaggc

SEQ ID NO: 1379 - RNA, 19 nt, Artificial Sequence
  Description of Artificial Sequence: Synthetic oligonucleotide
gccuggaguuuauucggaa

SEQ ID NO: 1380 - RNA, 19 nt, Artificial Sequence
  Description of Artificial Sequence: Synthetic oligonucleotide
uuccgaauaaacuccaggc

SEQ ID NO: 1381 - DNA, 21 bp, Artificial Sequence
  Description of Combined DNA/RNA Molecule: Synthetic oligonucleotide
  Description of Artificial Sequence: Synthetic oligonucleotide
gccuggaguuuauucggaatt

SEQ ID NO: 1382 - DNA, 21 bp, Artificial Sequence
  Description of Combined DNA/RNA Molecule: Synthetic oligonucleotide
  Description of Artificial Sequence: Synthetic oligonucleotide
uuccgaauaaacuccaggctt

SEQ ID NO: 1383 - DNA, 21 bp, Artificial Sequence
  Description of Combined DNA/RNA Molecule: Synthetic oligonucleotide
  Description of Artificial Sequence: Synthetic oligonucleotide
gccuggaguuuauucggaatt

SEQ ID NO: 1384 - DNA, 21 bp, Artificial Sequence
  Description of Combined DNA/RNA Molecule: Synthetic oligonucleotide
  Description of Artificial Sequence: Synthetic oligonucleotide
uuccgaauaaacuccaggctt

SEQ ID NO: 1385 - DNA, 21 bp, Artificial Sequence
  Description of Combined DNA/RNA Molecule: Synthetic oligonucleotide
  Description of Artificial Sequence: Synthetic oligonucleotide
gccuggaguuuauucggaatt

SEQ ID NO: 1386 - DNA, 21 bp, Artificial Sequence
  Description of Combined DNA/RNA Molecule: Synthetic oligonucleotide
  Description of Artificial Sequence: Synthetic oligonucleotide
uuccgaauaaacuccaggctt

SEQ ID NO: 1387 - DNA, 21 bp, Artificial Sequence
  Description of Combined DNA/RNA Molecule: Synthetic oligonucleotide
  Description of Artificial Sequence: Synthetic oligonucleotide
gccuggaguuuauucggaatt

SEQ ID NO: 1388 - DNA, 21 bp, Artificial Sequence
  Description of Combined DNA/RNA Molecule: Synthetic oligonucleotide
  Description of Artificial Sequence: Synthetic oligonucleotide
uuccgaauaaacuccaggctt

SEQ ID NO: 1389 - DNA, 21 bp, Artificial Sequence
  Description of Combined DNA/RNA Molecule: Synthetic oligonucleotide
  Description of Artificial Sequence: Synthetic oligonucleotide
gccuggaguuuauucggaatt

SEQ ID NO: 1390 - RNA, 21 nt, Artificial Sequence
  Description of Artificial Sequence: Synthetic oligonucleotide
uuccgaauaaacuccaggccu

SEQ ID NO: 1391 - DNA, 21 bp, Artificial Sequence
  Description of Combined DNA/RNA Molecule: Synthetic oligonucleotide
  Description of Artificial Sequence: Synthetic oligonucleotide
gccuggaguuuauucggaatt

SEQ ID NO: 1392 - RNA, 21 nt, Artificial Sequence
  Description of Artificial Sequence: Synthetic oligonucleotide
uuccgaauaaacuccaggccu

SEQ ID NO: 1393 - DNA, 21 bp, Artificial Sequence
  Description of Combined DNA/RNA Molecule: Synthetic oligonucleotide
  Description of Artificial Sequence: Synthetic oligonucleotide
gccuggaguuuauucggaatt

SEQ ID NO: 1394 - DNA, 21 bp, Artificial Sequence
  Description of Combined DNA/RNA Molecule: Synthetic oligonucleotide
  Description of Artificial Sequence: Synthetic oligonucleotide
uuccgaauaaacuccaggctt

SEQ ID NO: 1395 - DNA, 21 bp, Artificial Sequence
  Description of Combined DNA/RNA Molecule: Synthetic oligonucleotide
  Description of Artificial Sequence: Synthetic oligonucleotide
gccuggaguuuauucggaatt

SEQ ID NO: 1396 - DNA, 21 bp, Artificial Sequence
  Description of Combined DNA/RNA Molecule: Synthetic oligonucleotide
  Description of Artificial Sequence: Synthetic oligonucleotide
uuccgaauaaacuccaggctt

SEQ ID NO: 1397 - DNA, 22 bp, Artificial Sequence
  Description of Combined DNA/RNA Molecule: Synthetic oligonucleotide
  Description of Artificial Sequence: Synthetic oligonucleotide
  modified_base (7)..(7): a, c, g, t, u, unknown or other
gccuggnaguuuauucggaatt

SEQ ID NO: 1398 - DNA, 21 bp, Artificial Sequence
  Description of Combined DNA/RNA Molecule: Synthetic oligonucleotide
  Description of Artificial Sequence: Synthetic oligonucleotide
uuccgaauaaacuccaggctt

SEQ ID NO: 1399 - DNA, 22 bp, Artificial Sequence
  Description of Combined DNA/RNA Molecule: Synthetic oligonucleotide
  Description of Artificial Sequence: Synthetic oligonucleotide
  modified_base (22)..(22): 3'-terminal abasic nucleotide
gccuggaguuuauucggaattn

SEQ ID NO: 1400 - DNA, 22 bp, Artificial Sequence
  Description of Combined DNA/RNA Molecule: Synthetic oligonucleotide
  Description of Artificial Sequence: Synthetic oligonucleotide
  modified_base (22)..(22): 3'-terminal abasic nucleotide
uuccgaauaaacuccaggcttn

SEQ ID NO: 1401 - RNA, 19 nt, Artificial Sequence
  Description of Artificial Sequence: Synthetic oligonucleotide
gccuggaguuuauucggaa

SEQ ID NO: 1402 - RNA, 21 nt, Artificial Sequence
  Description of Artificial Sequence: Synthetic oligonucleotide
uuccgaauaaacuccaggccu

SEQ ID NO: 1403 - RNA, 19 nt, Artificial Sequence
  Description of Artificial Sequence: Synthetic oligonucleotide
gccuggaguuuauucggaa

SEQ ID NO: 1404 - RNA, 21 nt, Artificial Sequence
  Description of Artificial Sequence: Synthetic oligonucleotide
uuccgaauaaacuccaggccu

SEQ ID NO: 1405 - RNA, 19 nt, Artificial Sequence
  Description of Artificial Sequence: Synthetic oligonucleotide
gccuggaguuuauucggaa

SEQ ID NO: 1406 - RNA, 21 nt, Artificial Sequence
  Description of Artificial Sequence: Synthetic oligonucleotide
uuccgaauaaacuccaggccu

SEQ ID NO: 1407 - RNA, 19 nt, Artificial Sequence
  Description of Artificial Sequence: Synthetic oligonucleotide
gccuggaguuuauucggaa

SEQ ID NO: 1408 - DNA, 21 bp, Artificial Sequence
  Description of Combined DNA/RNA Molecule: Synthetic oligonucleotide
  Description of Artificial Sequence: Synthetic oligonucleotide
uuccgaauaaacuccaggctt

SEQ ID NO: 1409 - RNA, 19 nt, Artificial Sequence
  Description of Artificial Sequence: Synthetic oligonucleotide
gccuggaguuuauucggaa

SEQ ID NO: 1410 - DNA, 21 bp, Artificial Sequence
  Description of Combined DNA/RNA Molecule: Synthetic oligonucleotide
  Description of Artificial Sequence: Synthetic oligonucleotide
uuccgaauaaacuccaggctt

SEQ ID NO: 1411 - RNA, 19 nt, Artificial Sequence
  Description of Artificial Sequence: Synthetic oligonucleotide
gccuggaguuuauucggaa

SEQ ID NO: 1412 - RNA, 19 nt, Artificial Sequence
  Description of Artificial Sequence: Synthetic oligonucleotide
uuccgaauaaacuccaggc

SEQ ID NO: 1413 - RNA, 19 nt, Artificial Sequence
  Description of Artificial Sequence: Synthetic oligonucleotide
gccuggaguuuauucggaa

SEQ ID NO: 1414 - RNA, 19 nt, Artificial Sequence
  Description of Artificial Sequence: Synthetic oligonucleotide
uuccgaauaaacuccaggc

SEQ ID NO: 1415 - RNA, 19 nt, Artificial Sequence
  Description of Artificial Sequence: Synthetic oligonucleotide
gccuggaguuuauucggaa

SEQ ID NO: 1416 - RNA, 21 nt, Artificial Sequence
  Description of Artificial Sequence: Synthetic oligonucleotide
uuccgaauaaacuccaggccu

SEQ ID NO: 1417 - RNA, 19 nt, Artificial Sequence
  Description of Artificial Sequence: Synthetic oligonucleotide
gccuggaguuuauucggaa

SEQ ID NO: 1418 - RNA, 21 nt, Artificial Sequence
  Description of Artificial Sequence: Synthetic oligonucleotide
uuccgaauaaacuccaggccu

SEQ ID NO: 1419 - RNA, 19 nt, Artificial Sequence
  Description of Artificial Sequence: Synthetic oligonucleotide
gccuggaguuuauucggaa

SEQ ID NO: 1420 - DNA, 21 bp, Artificial Sequence
  Description of Combined DNA/RNA Molecule: Synthetic oligonucleotide
  Description of Artificial Sequence: Synthetic oligonucleotide
uuccgaauaaacuccaggctt

SEQ ID NO: 1421 - RNA, 19 nt, Artificial Sequence
  Description of Artificial Sequence: Synthetic oligonucleotide
gccuggaguuuauucggaa

SEQ ID NO: 1422 - DNA, 21 bp, Artificial Sequence
  Description of Combined DNA/RNA Molecule: Synthetic oligonucleotide
  Description of Artificial Sequence: Synthetic oligonucleotide
uuccgaauaaacuccaggctt

SEQ ID NO: 1423 - RNA, 19 nt, Artificial Sequence
  Description of Artificial Sequence: Synthetic oligonucleotide
gccuggaguuuauucggaa

SEQ ID NO: 1424 - RNA, 21 nt, Artificial Sequence
  Description of Artificial Sequence: Synthetic oligonucleotide
uuccgaauaaacuccaggccu

SEQ ID NO: 1425 - DNA, 21 bp, Artificial Sequence
  Description of Combined DNA/RNA Molecule: Synthetic oligonucleotide
  Description of Artificial Sequence: Synthetic oligonucleotide
gccuggaguuuauucggaatt

SEQ ID NO: 1426 - DNA, 21 bp, Artificial Sequence
  Description of Combined DNA/RNA Molecule: Synthetic oligonucleotide
  Description of Artificial Sequence: Synthetic oligonucleotide
uuccgaauaaacuccaggctt

SEQ ID NO: 1427 - DNA, 21 bp, Artificial Sequence
  Description of Combined DNA/RNA Molecule: Synthetic oligonucleotide
  Description of Artificial Sequence: Synthetic oligonucleotide
gccuggaguuuauucggaatt

SEQ ID NO: 1428 - DNA, 21 bp, Artificial Sequence
  Description of Combined DNA/RNA Molecule: Synthetic oligonucleotide
  Description of Artificial Sequence: Synthetic oligonucleotide
uuccgaauaaacuccaggctt

SEQ ID NO: 1429 - DNA, 21 bp, Artificial Sequence
  Description of Combined DNA/RNA Molecule: Synthetic oligonucleotide
  Description of Artificial Sequence: Synthetic oligonucleotide
gccuggaguuuauucggaatt

SEQ ID NO: 1430 - DNA, 21 bp, Artificial Sequence
  Description of Combined DNA/RNA Molecule: Synthetic oligonucleotide
  Description of Artificial Sequence: Synthetic oligonucleotide
uuccgaauaaacuccaggctt

SEQ ID NO: 1431 - DNA, 21 bp, Artificial Sequence
  Description of Combined DNA/RNA Molecule: Synthetic oligonucleotide
  Description of Artificial Sequence: Synthetic oligonucleotide
gccuggaguuuauucggaatt

SEQ ID NO: 1432 - DNA, 21 bp, Artificial Sequence
  Description of Combined DNA/RNA Molecule: Synthetic oligonucleotide
  Description of Artificial Sequence: Synthetic oligonucleotide
uuccgaauaaacuccaggctt

SEQ ID NO: 1433 - DNA, 21 bp, Artificial Sequence
  Description of Combined DNA/RNA Molecule: Synthetic oligonucleotide
  Description of Artificial Sequence: Synthetic oligonucleotide
gccuggaguuuauucggaatt

SEQ ID NO: 1434 - DNA, 21 bp, Artificial Sequence
  Description of Combined DNA/RNA Molecule: Synthetic oligonucleotide
  Description of Artificial Sequence: Synthetic oligonucleotide
uuccgaauaaacuccaggctt

SEQ ID NO: 1435 - DNA, 21 bp, Artificial Sequence
  Description of Combined DNA/RNA Molecule: Synthetic oligonucleotide
  Description of Artificial Sequence: Synthetic oligonucleotide
gccuggaguuuauucggaatt

SEQ ID NO: 1436 - DNA, 21 bp, Artificial Sequence
  Description of Combined DNA/RNA Molecule: Synthetic oligonucleotide
  Description of Artificial Sequence: Synthetic oligonucleotide
uuccgaauaaacuccaggctt

SEQ ID NO: 1437 - DNA, 21 bp, Artificial Sequence
  Description of Combined DNA/RNA Molecule: Synthetic oligonucleotide
  Description of Artificial Sequence: Synthetic oligonucleotide
gccuggaguuuauucggaatt

SEQ ID NO: 1438 - DNA, 21 bp, Artificial Sequence
  Description of Combined DNA/RNA Molecule: Synthetic oligonucleotide
  Description of Artificial Sequence: Synthetic oligonucleotide
uuccgaauaaacuccaggctt

SEQ ID NO: 1439 - DNA, 21 bp, Artificial Sequence
  Description of Combined DNA/RNA Molecule: Synthetic oligonucleotide
  Description of Artificial Sequence: Synthetic oligonucleotide
gccuggaguuuauucggaatt

SEQ ID NO: 1440 - RNA, 21 nt, Artificial Sequence
  Description of Artificial Sequence: Synthetic oligonucleotide
uuccgaauaaacuccaggccu

SEQ ID NO: 1441 - DNA, 21 bp, Artificial Sequence
  Description of Combined DNA/RNA Molecule: Synthetic oligonucleotide
  Description of Artificial Sequence: Synthetic oligonucleotide
gccuggaguuuauucggaatt

SEQ ID NO: 1442 - RNA, 21 nt, Artificial Sequence
  Description of Artificial Sequence: Synthetic oligonucleotide
uuccgaauaaacuccaggccu

SEQ ID NO: 1443 - DNA, 21 bp, Artificial Sequence
  Description of Combined DNA/RNA Molecule: Synthetic oligonucleotide
  Description of Artificial Sequence: Synthetic oligonucleotide
gccuggaguuuauucggaatt

SEQ ID NO: 1444 - DNA, 21 bp, Artificial Sequence
  Description of Combined DNA/RNA Molecule: Synthetic oligonucleotide
  Description of Artificial Sequence: Synthetic oligonucleotide
uuccgaauaaacuccaggctt

SEQ ID NO: 1445 - DNA, 21 bp, Artificial Sequence
  Description of Combined DNA/RNA Molecule: Synthetic oligonucleotide
  Description of Artificial Sequence: Synthetic oligonucleotide
gccuggaguuuauucggaatt

SEQ ID NO: 1446 - DNA, 21 bp, Artificial Sequence
  Description of Combined DNA/RNA Molecule: Synthetic oligonucleotide
  Description of Artificial Sequence: Synthetic oligonucleotide
uuccgaauaaacuccaggctt

SEQ ID NO: 1447 - DNA, 21 bp, Artificial Sequence
  Description of Combined DNA/RNA Molecule: Synthetic oligonucleotide
  Description of Artificial Sequence: Synthetic oligonucleotide
gccuggaguuuauucggaatt

SEQ ID NO: 1448 - DNA, 21 bp, Artificial Sequence
  Description of Combined DNA/RNA Molecule: Synthetic oligonucleotide
  Description of Artificial Sequence: Synthetic oligonucleotide
uuccgaauaaacuccaggctt

SEQ ID NO: 1449 - DNA, 21 bp, Artificial Sequence
  Description of Combined DNA/RNA Molecule: Synthetic oligonucleotide
  Description of Artificial Sequence: Synthetic oligonucleotide
gccuggaguuuauucggaatt

SEQ ID NO: 1450 - DNA, 21 bp, Artificial Sequence
  Description of Combined DNA/RNA Molecule: Synthetic oligonucleotide
  Description of Artificial Sequence: Synthetic oligonucleotide
uuccgaauaaacuccaggctt

SEQ ID NO: 1451 - DNA, 21 bp, Artificial Sequence
  Description of Combined DNA/RNA Molecule: Synthetic oligonucleotide
  Description of Artificial Sequence: Synthetic oligonucleotide
gccuggaguuuauucggaatt

SEQ ID NO: 1452 - RNA, 21 nt, Artificial Sequence
  Description of Artificial Sequence: Synthetic oligonucleotide
uuccgaauaaacuccaggccu

SEQ ID NO: 1453 - DNA, 21 bp, Artificial Sequence
  Description of Combined DNA/RNA Molecule: Synthetic oligonucleotide
  Description of Artificial Sequence: Synthetic oligonucleotide
gccuggaguuuauucggaatt

SEQ ID NO: 1454 - RNA, 21 nt, Artificial Sequence
  Description of Artificial Sequence: Synthetic oligonucleotide
uuccgaauaaacuccaggccu

SEQ ID NO: 1455 - DNA, 21 bp, Artificial Sequence
  Description of Combined DNA/RNA Molecule: Synthetic oligonucleotide
  Description of Artificial Sequence: Synthetic oligonucleotide
gccuggaguuuauucggaatt

SEQ ID NO: 1456 - RNA, 21 nt, Artificial Sequence
  Description of Artificial Sequence: Synthetic oligonucleotide
uuccgaauaaacuccaggccu

SEQ ID NO: 1457 - DNA, 21 bp, Artificial Sequence
  Description of Combined DNA/RNA Molecule: Synthetic oligonucleotide
  Description of Artificial Sequence: Synthetic oligonucleotide
gccuggaguuuauucggaatt

SEQ ID NO: 1458 - DNA, 21 bp, Artificial Sequence
  Description of Combined DNA/RNA Molecule: Synthetic oligonucleotide
  Description of Artificial Sequence: Synthetic oligonucleotide
uuccgaauaaacuccaggctt

SEQ ID NO: 1459 - DNA, 21 bp, Artificial Sequence
  Description of Combined DNA/RNA Molecule: Synthetic oligonucleotide
  Description of Artificial Sequence: Synthetic oligonucleotide
gccuggaguuuauucggaatt

SEQ ID NO: 1460 - DNA, 21 bp, Artificial Sequence
  Description of Combined DNA/RNA Molecule: Synthetic oligonucleotide
  Description of Artificial Sequence: Synthetic oligonucleotide
uuccgaauaaacuccaggctt

SEQ ID NO: 1461 - DNA, 21 bp, Artificial Sequence
  Description of Combined DNA/RNA Molecule: Synthetic oligonucleotide
  Description of Artificial Sequence: Synthetic oligonucleotide
gccuggaguuuauucggaatt

SEQ ID NO: 1462 - DNA, 21 bp, Artificial Sequence
  Description of Combined DNA/RNA Molecule: Synthetic oligonucleotide
  Description of Artificial Sequence: Synthetic oligonucleotide
uuccgaauaaacuccaggctt

SEQ ID NO: 1463 - DNA, 21 bp, Artificial Sequence
  Description of Combined DNA/RNA Molecule: Synthetic oligonucleotide
  Description of Artificial Sequence: Synthetic oligonucleotide
gccuggaguuuauucggaatt

SEQ ID NO: 1464 - DNA, 21 bp, Artificial Sequence
  Description of Combined DNA/RNA Molecule: Synthetic oligonucleotide
  Description of Artificial Sequence: Synthetic oligonucleotide
uuccgaauaaacuccaggctt

SEQ ID NO: 1465 - DNA, 22 bp, Artificial Sequence
  Description of Combined DNA/RNA Molecule: Synthetic oligonucleotide
  Description of Artificial Sequence: Synthetic oligonucleotide
  modified_base (7)..(7): a, c, g, t, u, unknown or other
gccuggnaguuuauucggaatt

SEQ ID NO: 1466 - DNA, 21 bp, Artificial Sequence
  Description of Combined DNA/RNA Molecule: Synthetic oligonucleotide
  Description of Artificial Sequence: Synthetic oligonucleotide
uuccgaauaaacuccaggctt

SEQ ID NO: 1467 - RNA, 19 nt, Artificial Sequence
  Description of Artificial Sequence: Synthetic oligonucleotide
gccuggaguuuauucggaa

SEQ ID NO: 1468 - DNA, 21 bp, Artificial Sequence
  Description of Combined DNA/RNA Molecule: Synthetic oligonucleotide
  Description of Artificial Sequence: Synthetic oligonucleotide
uuccgaauaaacuccaggctt

SEQ ID NO: 1469 - RNA, 20 nt, Artificial Sequence
  Description of Artificial Sequence: Synthetic oligonucleotide
gccuggagguuuauucggaa

SEQ ID NO: 1470 - RNA, 21 nt, Artificial Sequence
  Description of Artificial Sequence: Synthetic oligonucleotide
uuccgaauaaacuccaggccu

SEQ ID NO: 1471 - RNA, 20 nt, Artificial Sequence
  Description of Artificial Sequence: Synthetic oligonucleotide
gccuggagguuuauucggaa

SEQ ID NO: 1472 - RNA, 19 nt, Artificial Sequence
  Description of Artificial Sequence: Synthetic oligonucleotide
uuccgaauaaacuccaggc

SEQ ID NO: 1473 - RNA, 20 nt, Artificial Sequence
  Description of Artificial Sequence: Synthetic oligonucleotide
gccuggagguuuauucggaa

SEQ ID NO: 1474 - RNA, 21 nt, Artificial Sequence
  Description of Artificial Sequence: Synthetic oligonucleotide
uuccgaauaaacuccaggccu

SEQ ID NO: 1475 - RNA, 20 nt, Artificial Sequence
  Description of Artificial Sequence: Synthetic oligonucleotide
gccuggagguuuauucggaa

SEQ ID NO: 1476 - RNA, 21 nt, Artificial Sequence
  Description of Artificial Sequence: Synthetic oligonucleotide
uuccgaauaaacuccaggccu

SEQ ID NO: 1477 - RNA, 20 nt, Artificial Sequence
  Description of Artificial Sequence: Synthetic oligonucleotide
gccuggagguuuauucggaa

SEQ ID NO: 1478 - RNA, 19 nt, Artificial Sequence
  Description of Artificial Sequence: Synthetic oligonucleotide
uuccgaauaaacuccaggc

SEQ ID NO: 1479 - RNA, 20 nt, Artificial Sequence
  Description of Artificial Sequence: Synthetic oligonucleotide
gccuggagguuuauucggaa

SEQ ID NO: 1480 - DNA, 21 bp, Artificial Sequence
  Description of Combined DNA/RNA Molecule: Synthetic oligonucleotide
  Description of Artificial Sequence: Synthetic oligonucleotide
uuccgaauaaacuccaggctt

SEQ ID NO: 1481 - RNA, 20 nt, Artificial Sequence
  Description of Artificial Sequence: Synthetic oligonucleotide
gccuggagguuuauucggaa

SEQ ID NO: 1482 - DNA, 21 bp, Artificial Sequence
  Description of Combined DNA/RNA Molecule: Synthetic oligonucleotide
  Description of Artificial Sequence: Synthetic oligonucleotide
uuccgaauaaacuccaggctt

SEQ ID NO: 1483 - RNA, 20 nt, Artificial Sequence
  Description of Artificial Sequence: Synthetic oligonucleotide
gccuggagguuuauucggaa

SEQ ID NO: 1484 - DNA, 21 bp, Artificial Sequence
  Description of Combined DNA/RNA Molecule: Synthetic oligonucleotide
  Description of Artificial Sequence: Synthetic oligonucleotide
uuccgaauaaacuccaggctt

SEQ ID NO: 1485 - DNA, 21 bp, Artificial Sequence
  Description of Combined DNA/RNA Molecule: Synthetic oligonucleotide
  Description of Artificial Sequence: Synthetic oligonucleotide
gccuggaguuuauucggaatt

SEQ ID NO: 1486 - RNA, 21 nt, Artificial Sequence
  Description of Artificial Sequence: Synthetic oligonucleotide
uuccgaauaaacuccaggccu

SEQ ID NO: 1487 - RNA, 19 nt, Artificial Sequence
  Description of Artificial Sequence: Synthetic oligonucleotide
gccuggaguuuauucggaa

SEQ ID NO: 1488 - RNA, 21 nt, Artificial Sequence
  Description of Artificial Sequence: Synthetic oligonucleotide
uuccgaauaaacuccaggccu

SEQ ID NO: 1489 - RNA, 19 nt, Artificial Sequence
  Description of Artificial Sequence: Synthetic oligonucleotide
gccuggaguuuauucggaa

SEQ ID NO: 1490 - RNA, 21 nt, Artificial Sequence
  Description of Artificial Sequence: Synthetic oligonucleotide
uuccgaauaaacuccaggccu

SEQ ID NO: 1491 - DNA, 21 bp, Artificial Sequence
  Description of Combined DNA/RNA Molecule: Synthetic oligonucleotide
  Description of Artificial Sequence: Synthetic oligonucleotide
gccuggaguuuauucggaatt

SEQ ID NO: 1492 - RNA, 21 nt, Artificial Sequence
  Description of Artificial Sequence: Synthetic oligonucleotide
uuccgaauaaacuccaggccu

SEQ ID NO: 1493 - DNA, 22 bp, Artificial Sequence
  Description of Combined DNA/RNA Molecule: Synthetic oligonucleotide
  Description of Artificial Sequence: Synthetic oligonucleotide
  modified_base (7)..(7): a, c, g, t, u, unknown or other
gccuggnaguuuauucggaatt

SEQ ID NO: 1494 - RNA, 21 nt, Artificial Sequence
  Description of Artificial Sequence: Synthetic oligonucleotide
uuccgaauaaacuccaggccu

SEQ ID NO: 1495 - DNA, 21 bp, Artificial Sequence
  Description of Combined DNA/RNA Molecule: Synthetic oligonucleotide
  Description of Artificial Sequence: Synthetic oligonucleotide
gccuggaguuuauucggaatt

SEQ ID NO: 1496 - RNA, 21 nt, Artificial Sequence
  Description of Artificial Sequence: Synthetic oligonucleotide
uuccgaauaaacuccaggccu

SEQ ID NO: 1497 - DNA, 21 bp, Artificial Sequence
  Description of Combined DNA/RNA Molecule: Synthetic oligonucleotide
  Description of Artificial Sequence: Synthetic oligonucleotide
gccuggaguuuauucggaatt

SEQ ID NO: 1498 - RNA, 21 nt, Artificial Sequence
  Description of Artificial Sequence: Synthetic oligonucleotide
uuccgaauaaacuccaggccu

SEQ ID NO: 1499 - RNA, 19 nt, Artificial Sequence
  Description of Artificial Sequence: Synthetic oligonucleotide
gccuggaguuuauucggaa

SEQ ID NO: 1500 - RNA, 21 nt, Artificial Sequence
  Description of Artificial Sequence: Synthetic oligonucleotide
uuccgaauaaacuccaggccu

SEQ ID NO: 1501 - RNA, 20 nt, Artificial Sequence
  Description of Artificial Sequence: Synthetic oligonucleotide
gccuggagguuuauucggaa

SEQ ID NO: 1502 - RNA, 21 nt, Artificial Sequence
  Description of Artificial Sequence: Synthetic oligonucleotide
uuccgaauaaacuccaggccu

SEQ ID NO: 1503 - DNA, 21 bp, Artificial Sequence
  Description of Combined DNA/RNA Molecule: Synthetic oligonucleotide
  Description of Artificial Sequence: Synthetic oligonucleotide
gccuggaguuuauucggaatt

SEQ ID NO: 1504 - DNA, 21 bp, Artificial Sequence
  Description of Combined DNA/RNA Molecule: Synthetic oligonucleotide
  Description of Artificial Sequence: Synthetic oligonucleotide
uuccgaauaaacuccaggctt

SEQ ID NO: 1505 - DNA, 21 bp, Artificial Sequence
  Description of Combined DNA/RNA Molecule: Synthetic oligonucleotide
  Description of Artificial Sequence: Synthetic oligonucleotide
gccuggaguuuauucggaatt

SEQ ID NO: 1506 - DNA, 21 bp, Artificial Sequence
  Description of Combined DNA/RNA Molecule: Synthetic oligonucleotide
  Description of Artificial Sequence: Synthetic oligonucleotide
uuccgaauaaacuccaggctt

SEQ ID NO: 1507 - DNA, 21 bp, Artificial Sequence
  Description of Combined DNA/RNA Molecule: Synthetic oligonucleotide
  Description of Artificial Sequence: Synthetic oligonucleotide
gccuggaguuuauucggaatt

SEQ ID NO: 1508 - DNA, 21 bp, Artificial Sequence
  Description of Combined DNA/RNA Molecule: Synthetic oligonucleotide
  Description of Artificial Sequence: Synthetic oligonucleotide
uuccgaauaaacuccaggctt

SEQ ID NO: 1509 - DNA, 21 bp, Artificial Sequence
  Description of Combined DNA/RNA Molecule: Synthetic oligonucleotide
  Description of Artificial Sequence: Synthetic oligonucleotide
gccuggaguuuauucggaatt

SEQ ID NO: 1510 - DNA, 21 bp, Artificial Sequence
  Description of Combined DNA/RNA Molecule: Synthetic oligonucleotide
  Description of Artificial Sequence: Synthetic oligonucleotide
uuccgaauaaacuccaggctt

SEQ ID NO: 1511 - DNA, 21 bp, Artificial Sequence
  Description of Combined DNA/RNA Molecule: Synthetic oligonucleotide
  Description of Artificial Sequence: Synthetic oligonucleotide
gccuggaguuuauucggaatt

SEQ ID NO: 1512 - DNA, 21 bp, Artificial Sequence
  Description of Combined DNA/RNA Molecule: Synthetic oligonucleotide
  Description of Artificial Sequence: Synthetic oligonucleotide
uuccgaauaaacuccaggctt

SEQ ID NO: 1513 - DNA, 21 bp, Artificial Sequence
  Description of Combined DNA/RNA Molecule: Synthetic oligonucleotide
  Description of Artificial Sequence: Synthetic oligonucleotide
gccuggaguuuauucggaatt

SEQ ID NO: 1514 - DNA, 21 bp, Artificial Sequence
  Description of Combined DNA/RNA Molecule: Synthetic oligonucleotide
  Description of Artificial Sequence: Synthetic oligonucleotide
uuccgaauaaacuccaggctt

SEQ ID NO: 1515 - DNA, 21 bp, Artificial Sequence
  Description of Combined DNA/RNA Molecule: Synthetic oligonucleotide
  Description of Artificial Sequence: Synthetic oligonucleotide
uucuagaccuguuuugcuutt

SEQ ID NO: 1516 - DNA, 21 bp, Artificial Sequence
  Description of Combined DNA/RNA Molecule: Synthetic oligonucleotide
  Description of Artificial Sequence: Synthetic oligonucleotide
aagcaaaacaggucuagaatt

SEQ ID NO: 1517 - DNA, 21 bp, Artificial Sequence
  Description of Combined DNA/RNA Molecule: Synthetic oligonucleotide
  Description of Artificial Sequence: Synthetic oligonucleotide
agguguaucuccuagacactt

SEQ ID NO: 1518 - DNA, 21 bp, Artificial Sequence
  Description of Combined DNA/RNA Molecule: Synthetic oligonucleotide
  Description of Artificial Sequence: Synthetic oligonucleotide
gugucuaggagauacaccutt

SEQ ID NO: 1519 - DNA, 21 bp, Artificial Sequence
  Description of Combined DNA/RNA Molecule: Synthetic oligonucleotide
  Description of Artificial Sequence: Synthetic oligonucleotide
cuuacgcugaguacuucgatt

SEQ ID NO: 1520 - DNA, 21 bp, Artificial Sequence
  Description of Combined DNA/RNA Molecule: Synthetic oligonucleotide
  Description of Artificial Sequence: Synthetic oligonucleotide
ucgaaguacucagcguaagtt

SEQ ID NO: 1521 - DNA, 21 bp, Artificial Sequence
  Description of Combined DNA/RNA Molecule: Synthetic oligonucleotide
  Description of Artificial Sequence: Synthetic oligonucleotide
gccuggaguuuauucggaatt

SEQ ID NO: 1522 - DNA, 21 bp, Artificial Sequence
  Description of Combined DNA/RNA Molecule: Synthetic oligonucleotide
  Description of Artificial Sequence: Synthetic oligonucleotide
uuccgaauaaacuccaggctt

SEQ ID NO: 1523 - RNA, 19 nt, Artificial Sequence
  Description of Artificial Sequence: Synthetic oligonucleotide
uucuagaccuguuuugcuu

SEQ ID NO: 1524 - RNA, 19 nt, Artificial Sequence
  Description of Artificial Sequence: Synthetic oligonucleotide
gccuggaguuuauucggaa

SEQ ID NO: 1525 - DNA, 21 bp, Artificial Sequence
  Description of Combined DNA/RNA Molecule: Synthetic oligonucleotide
  Description of Artificial Sequence: Synthetic oligonucleotide
ucauaggccuggaguuuautt

SEQ ID NO: 1526 - DNA, 21 bp, Artificial Sequence
  Description of Combined DNA/RNA Molecule: Synthetic oligonucleotide
  Description of Artificial Sequence: Synthetic oligonucleotide
auaaacuccaggccuaugatt

SEQ ID NO: 1527 - DNA, 21 bp, Artificial Sequence
  Description of Combined DNA/RNA Molecule: Synthetic oligonucleotide
  Description of Artificial Sequence: Synthetic oligonucleotide
ucauaggccuggaguuuautt

SEQ ID NO: 1528 - DNA, 21 bp, Artificial Sequence
  Description of Combined DNA/RNA Molecule: Synthetic oligonucleotide
  Description of Artificial Sequence: Synthetic oligonucleotide
auaaacuccaggccuaugatt

SEQ ID NO: 1529 - DNA, 21 bp, Artificial Sequence
  Description of Combined DNA/RNA Molecule: Synthetic oligonucleotide
  Description of Artificial Sequence: Synthetic oligonucleotide
ucauaggccuggaguuuautt

SEQ ID NO: 1530 - DNA, 21 bp, Artificial Sequence
  Description of Combined DNA/RNA Molecule: Synthetic oligonucleotide
  Description of Artificial Sequence: Synthetic oligonucleotide
auaaacuccaggccuaugatt

SEQ ID NO: 1531 - DNA, 21 bp, Artificial Sequence
  Description of Combined DNA/RNA Molecule: Synthetic oligonucleotide
  Description of Artificial Sequence: Synthetic oligonucleotide
uucuagaccuguuuugcuutt

SEQ ID NO: 1532 - DNA, 21 bp, Artificial Sequence
  Description of Combined DNA/RNA Molecule: Synthetic oligonucleotide
  Description of Artificial Sequence: Synthetic oligonucleotide
aagcaaaacaggucuagaatt

SEQ ID NO: 1533 - DNA, 21 bp, Artificial Sequence
  Description of Combined DNA/RNA Molecule: Synthetic oligonucleotide
  Description of Artificial Sequence: Synthetic oligonucleotide
uucuagaccuguuuugcuutt

SEQ ID NO: 1534 - DNA, 21 bp, Artificial Sequence
  Description of Combined DNA/RNA Molecule: Synthetic oligonucleotide
  Description of Artificial Sequence: Synthetic oligonucleotide
aagcaaaacaggucuagaatt

SEQ ID NO: 1535 - DNA, 21 bp, Artificial Sequence
  Description of Combined DNA/RNA Molecule: Synthetic oligonucleotide
  Description of Artificial Sequence: Synthetic oligonucleotide
uucuagaccuguuuugcuutt

SEQ ID NO: 1536 - DNA, 21 bp, Artificial Sequence
  Description of Combined DNA/RNA Molecule: Synthetic oligonucleotide
  Description of Artificial Sequence: Synthetic oligonucleotide
aagcaaaacaggucuagaatt

SEQ ID NO: 1537 - DNA, 21 bp, Artificial Sequence
  Description of Combined DNA/RNA Molecule: Synthetic oligonucleotide
  Description of Artificial Sequence: Synthetic oligonucleotide
uucuagaccuguuuugcuutt

SEQ ID NO: 1538 - DNA, 21 bp, Artificial Sequence
  Description of Combined DNA/RNA Molecule: Synthetic oligonucleotide
  Description of Artificial Sequence: Synthetic oligonucleotide
aagcaaaacaggucuagaatt

SEQ ID NO: 1539 - DNA, 21 bp, Artificial Sequence
  Description of Combined DNA/RNA Molecule: Synthetic oligonucleotide
  Description of Artificial Sequence: Synthetic oligonucleotide
  modified_base (9)..(9): difluorotoluyl ribo(or deoxyribo)nucleotide
uucuagacnuguuuugcuutt

SEQ ID NO: 1540 - DNA, 21 bp, Artificial Sequence
  Description of Combined DNA/RNA Molecule: Synthetic oligonucleotide
  Description of Artificial Sequence: Synthetic oligonucleotide
aagcaaaacaggucuagaatt

SEQ ID NO: 1541 - DNA, 21 bp, Artificial Sequence
  Description of Combined DNA/RNA Molecule: Synthetic oligonucleotide
  Description of Artificial Sequence: Synthetic oligonucleotide
  modified_base (9)..(9): difluorotoluyl ribo(or deoxyribo)nucleotide
uucuagacnuguuuugcuutt

SEQ ID NO: 1542 - DNA, 21 bp, Artificial Sequence
  Description of Combined DNA/RNA Molecule: Synthetic oligonucleotide
  Description of Artificial Sequence: Synthetic oligonucleotide
aagcaaaacaggucuagaatt

SEQ ID NO: 1543 - DNA, 21 bp, Artificial Sequence
  Description of Combined DNA/RNA Molecule: Synthetic oligonucleotide
  Description of Artificial Sequence: Synthetic oligonucleotide
  modified_base (10)..(10): difluorotoluyl ribo(or deoxyribo)nucleotide
uucuagaccnguuuugcuutt

SEQ ID NO: 1544 - DNA, 21 bp, Artificial Sequence
  Description of Combined DNA/RNA Molecule: Synthetic oligonucleotide
  Description of Artificial Sequence: Synthetic oligonucleotide
aagcaaaacaggucuagaatt

SEQ ID NO: 1545 - DNA, 21 bp, Artificial Sequence
  Description of Combined DNA/RNA Molecule: Synthetic oligonucleotide
  Description of Artificial Sequence: Synthetic oligonucleotide
  modified_base (10)..(10): difluorotoluyl ribo(or deoxyribo)nucleotide
uucuagaccnguuuugcuutt

SEQ ID NO: 1546 - DNA, 21 bp, Artificial Sequence
  Description of Combined DNA/RNA Molecule: Synthetic oligonucleotide
  Description of Artificial Sequence: Synthetic oligonucleotide
aagcaaaacaggucuagaatt

SEQ ID NO: 1547 - DNA, 21 bp, Artificial Sequence
  Description of Combined DNA/RNA Molecule: Synthetic oligonucleotide
  Description of Artificial Sequence: Synthetic oligonucleotide
  modified_base (11)..(11): difluorotoluyl ribo(or deoxyribo)nucleotide
uucuagaccunuuuugcuutt

SEQ ID NO: 1548 - DNA, 21 bp, Artificial Sequence
  Description of Combined DNA/RNA Molecule: Synthetic oligonucleotide
  Description of Artificial Sequence: Synthetic oligonucleotide
aagcaaaacaggucuagaatt

SEQ ID NO: 1549 - DNA, 21 bp, Artificial Sequence
  Description of Combined DNA/RNA Molecule: Synthetic oligonucleotide
  Description of Artificial Sequence: Synthetic oligonucleotide
  modified_base (11)..(11): difluorotoluyl ribo(or deoxyribo)nucleotide
uucuagaccunuuuugcuutt

SEQ ID NO: 1550 - DNA, 21 bp, Artificial Sequence
  Description of Combined DNA/RNA Molecule: Synthetic oligonucleotide
  Description of Artificial Sequence: Synthetic oligonucleotide
aagcaaaacaggucuagaatt

SEQ ID NO: 1551 - DNA, 21 bp, Artificial Sequence
  Description of Combined DNA/RNA Molecule: Synthetic oligonucleotide
  Description of Artificial Sequence: Synthetic oligonucleotide
uucuagaccuguuuugcuutt

SEQ ID NO: 1552 - DNA, 21 bp, Artificial Sequence
  Description of Combined DNA/RNA Molecule: Synthetic oligonucleotide
  Description of Artificial Sequence: Synthetic oligonucleotide
aagcaaaacaggucuagaatt

SEQ ID NO: 1553 - DNA, 21 bp, Artificial Sequence
  Description of Combined DNA/RNA Molecule: Synthetic oligonucleotide
  Description of Artificial Sequence: Synthetic oligonucleotide
uucuagaccuguuuugcuutt

SEQ ID NO: 1554 - DNA, 21 bp, Artificial Sequence
  Description of Combined DNA/RNA Molecule: Synthetic oligonucleotide
  Description of Artificial Sequence: Synthetic oligonucleotide
aagcaaaacaggucuagaatt

SEQ ID NO: 1555 - DNA, 21 bp, Artificial Sequence
  Description of Combined DNA/RNA Molecule: Synthetic oligonucleotide
  Description of Artificial Sequence: Synthetic oligonucleotide
uucuagaccuguuuugcuutt

SEQ ID NO: 1556 - DNA, 21 bp, Artificial Sequence
  Description of Combined DNA/RNA Molecule: Synthetic oligonucleotide
  Description of Artificial Sequence: Synthetic oligonucleotide
aagcaaaacaggucuagaatt

SEQ ID NO: 1557 - DNA, 21 bp, Artificial Sequence
  Description of Combined DNA/RNA Molecule: Synthetic oligonucleotide
  Description of Artificial Sequence: Synthetic oligonucleotide
uucuagaccuguuuugcuutt

SEQ ID NO: 1558 - DNA, 21 bp, Artificial Sequence
  Description of Combined DNA/RNA Molecule: Synthetic oligonucleotide
  Description of Artificial Sequence: Synthetic oligonucleotide
aagcaaaacaggucuagaatt

SEQ ID NO: 1559 - DNA, 21 bp, Artificial Sequence
  Description of Combined DNA/RNA Molecule: Synthetic oligonucleotide
  Description of Artificial Sequence: Synthetic oligonucleotide
  modified_base (9)..(9): difluorotoluyl ribo(or deoxyribo)nucleotide
uucuagacnuguuuugcuutt

SEQ ID NO: 1560 - DNA, 21 bp, Artificial Sequence
  Description of Combined DNA/RNA Molecule: Synthetic oligonucleotide
  Description of Artificial Sequence: Synthetic oligonucleotide
aagcaaaacaggucuagaatt

SEQ ID NO: 1561 - DNA, 21 bp, Artificial Sequence
  Description of Combined DNA/RNA Molecule: Synthetic oligonucleotide
  Description of Artificial Sequence: Synthetic oligonucleotide
  modified_base (9)..(9): difluorotoluyl ribo(or deoxyribo)nucleotide
uucuagacnuguuuugcuutt

SEQ ID NO: 1562 - DNA, 21 bp, Artificial Sequence
  Description of Combined DNA/RNA Molecule: Synthetic oligonucleotide
  Description of Artificial Sequence: Synthetic oligonucleotide
aagcaaaacaggucuagaatt

SEQ ID NO: 1563 - DNA, 21 bp, Artificial Sequence
  Description of Combined DNA/RNA Molecule: Synthetic oligonucleotide
  Description of Artificial Sequence: Synthetic oligonucleotide
  modified_base (10)..(10): difluorotoluyl ribo(or deoxyribo)nucleotide
uucuagaccnguuuugcuutt

SEQ ID NO: 1564 - DNA, 21 bp, Artificial Sequence
  Description of Combined DNA/RNA Molecule: Synthetic oligonucleotide
  Description of Artificial Sequence: Synthetic oligonucleotide
aagcaaaacaggucuagaatt

SEQ ID NO: 1565 - DNA, 21 bp, Artificial Sequence
  Description of Combined DNA/RNA Molecule: Synthetic oligonucleotide
  Description of Artificial Sequence: Synthetic oligonucleotide
  modified_base (10)..(10): difluorotoluyl ribo(or deoxyribo)nucleotide
uucuagaccnguuuugcuutt

SEQ ID NO: 1566 - DNA, 21 bp, Artificial Sequence
  Description of Combined DNA/RNA Molecule: Synthetic oligonucleotide
  Description of Artificial Sequence: Synthetic oligonucleotide
aagcaaaacaggucuagaatt

SEQ ID NO: 1567 - DNA, 21 bp, Artificial Sequence
  Description of Combined DNA/RNA Molecule: Synthetic oligonucleotide
  Description of Artificial Sequence: Synthetic oligonucleotide
  modified_base (11)..(11): difluorotoluyl ribo(or deoxyribo)nucleotide
uucuagaccunuuuugcuutt

SEQ ID NO: 1568 - DNA, 21 bp, Artificial Sequence
  Description of Combined DNA/RNA Molecule: Synthetic oligonucleotide
  Description of Artificial Sequence: Synthetic oligonucleotide
aagcaaaacaggucuagaatt

SEQ ID NO: 1569 - DNA, 21 bp, Artificial Sequence
  Description of Combined DNA/RNA Molecule: Synthetic oligonucleotide
  Description of Artificial Sequence: Synthetic oligonucleotide
  modified_base (11)..(11): difluorotoluyl ribo(or deoxyribo)nucleotide
uucuagaccunuuuugcuutt

SEQ ID NO: 1570 - DNA, 21 bp, Artificial Sequence
  Description of Combined DNA/RNA Molecule: Synthetic oligonucleotide
  Description of Artificial Sequence: Synthetic oligonucleotide
aagcaaaacaggucuagaatt
